(19) United States
(12) Patent Application Publication
(10) Pub. No.: US 2002/0082206 A1
(43) Pub. Date: Jun. 27, 2002

(54) Novel polynucleotides from atherogenic cells and polypeptides encoded thereby

(76) Inventors: Martin D. Leach, Madison, CT (US); Fuad Mehraban, Trumbull, CT (US); Pamela B. Conley, Palo Alto, CA (US); James N. Topper, Los Altos, CA (US); Debbie Law, San Francisco, CA (US)

Correspondence Address: Ivor R. Elrifi, Mintz, Levin, Cohn, Ferris,, Glovsky and Popeo, P.C., One Financial Center, Boston, MA, 02111, US

(21) Appl. No.: 09/867,550

(22) Filed: May 30, 2001

Related U.S. Application Data
(60) Provisional application No. 60/208,427, filed on May 30, 2000.

(51) Int. Cl. A61K 38/17; C07H 21/04; C12N 9/00; C12N 5/06; C12P 21/02; C07K 14/435

(52) U.S. Cl. 514/12; 536/23.1; 435/69.1; 435/325; 435/320.1; 435/183; 530/350

(57) ABSTRACT

The present invention provides ORFX, a novel isolated polypeptide, as well as a polynucleotide encoding ORFX and antibodies that immunospecifically bind to ORFX or any derivative, variant, mutant, or fragment of the ORFX polypeptide, polynucleotide or antibody. The invention additionally provides methods in which the ORFX polypeptide, polynucleotide and antibody are used in detection and treatment of a broad range of pathological states, as well as to others uses.

### RELATED APPLICATIONS

[0001] This application claims priority to provisional application U.S. Ser. No. 60/208,427, filed May 30, 2000, the contents of which are incorporated herein by reference in its entirety.

### BACKGROUND OF THE INVENTION

[0002] Formation of new blood vessels can occur by two related mechanisms: (1) angiogenesis, which is the de novo expansion of new vessels from pre-existing vessels, and (2) vasculogenesis, which is the formation of closed vessels through aggregation of endothelial cells. The inner surfaces of all blood vessels are lined with endothelial cells. Vascular endothelial cells, located at the interface between the circulating blood and the extravascular tissues, play prominent roles in maintaining cardiovascular homeostasis and mediating pathophysiological responses to injury. For example, angiogenesis occurs in the adult during events such as wound healing and ovulation. During angiogenesis, endothelial cells responding to environmental stimuli undergo a number of cellular alterations and responses, resulting in a complex series of steps, which involve degradation of the basement membrane by cellular proteases, penetration and migration of endothelial cells into the extracellular matrix, endothelial proliferation, and the formation of interconnected vascular networks. This formation of new vessels takes place in distinct phases that entail and rely upon modulation or expression of a variety of intracellular proteins, extracellular matrix components, proteases and protease inhibitors, inflammatory molecules, chemokines, and molecules involved in cell division and proliferation, cytoskeletal rearrangement, adhesion molecules and also apoptosis of certain endothelial cell populations.

[0003] Endothelial cells also undergo angiogenesis during the neovascularization associated with tumor growth and metastasis as well as a variety of non-neoplastic diseases or disorders. In the case of tumor growth, angiogenesis appears to be crucial for the transition from hyperplasia to neoplasia, and for providing nourishment to the growing solid tumor. See, e.g., Folkman, et al., 1989 Nature 339: 58-61. Angiogenesis allows tumors to be in contact with the vascular bed of the host, which, in turn, provides a route for metastasis of the tumor cells. In fact, the progression of solid tumor growth and metastasis depends on angiogenesis, as supported for example, by studies showing a correlation between the number and density of microvessels in histologic sections of invasive human breast carcinoma and actual presence of distant metastases. See, e.g., Weidner, et al., 1991 New Engl. J Med., 324: 1-8. Recent data suggests that blocking new blood vessel growth can slow tumor growth by cutting off the supply of oxygen and nutrients. Without a new blood supply tumors cannot grow more than about 1-2 mm in diameter. Thus new angiostatic therapies to treat cancer are desired.

### SUMMARY OF THE INVENTION

[0004] The invention is based in part on the discovery of nucleic acids that include open reading frames encoding novel polypeptides, and on the polypeptides encoded thereby. The open reading frames were discovered in human atherogenic cells, in particular in platelets and human umbilical vein endothelial cells (HUVEC), and are expressed in many other tissues as well. The nucleic acids and polypeptides are collectively referred to herein as “ORFX”.

[0005] Accordingly, in one aspect, the invention provides an isolated nucleic acid molecule (SEQ ID NO:2n−1, wherein n is an integer between 1-1051), that encodes novel polypeptide, or a fragment, homolog, analog or derivative thereof. The nucleic acid can include, e.g., a nucleic acid sequence encoding a polypeptide at least 85% identical to a polypeptide comprising the amino acid sequences of SEQ ID NO:2n, wherein n is an integer between 1-1051. The nucleic acid can be, e.g, a genomic DNA fragment, or a cDNA molecule.

[0006] Also included in the invention is a vector containing one or more of the nucleic acids described herein, and a cell containing the vectors or nucleic acids described herein.

[0007] The invention is also directed to host cells transformed with a recombinant expression vector comprising any of the nucleic acid molecules described above.

[0008] In another aspect, the invention includes a pharmaceutical composition that includes an ORFX nucleic acid and a pharmaceutically acceptable carrier or diluent.

[0009] In a further aspect, the invention includes a substantially purified ORF polypeptide, e.g., any of the ORFX polypeptides encoded by an ORFX nucleic acid, and fragments, homologs, analogs, and derivatives thereof. The invention also includes a pharmaceutical composition that includes an ORFX polypeptide and a pharmaceutically acceptable carrier or diluent.

[0010] In a still a further aspect, the invention provides an antibody that binds specifically to an ORFX polypeptide. The antibody can be, e.g., a monoclonal or polyclonal antibody, and fragments, homologs, analogs, and derivatives thereof. The invention also includes a pharmaceutical composition including ORFX antibody and a pharmaceutically acceptable carrier or diluent. The invention is also directed to isolated antibodies that bind to an epitope on a polypeptide encoded by any of the nucleic acid molecules described above.

[0011] The invention also includes kits comprising any of the pharmaceutical compositions described above.

[0012] The invention further provides a method for producing an ORFX polypeptide by providing a cell containing an ORFX nucleic acid, e.g., a vector that includes an ORFX nucleic acid, and culturing the cell under conditions sufficient to express the ORFX polypeptide encoded by the nucleic acid. The expressed ORFX polypeptide is then recovered from the cell. Preferably, the cell produces little or no endogenous ORFX polypeptide. The cell can be, e.g., a prokaryotic cell or eukaryotic cell.

[0013] The invention is also directed to methods of identifying an ORFX polypeptide or nucleic acids in a sample by contacting the sample with a compound that specifically binds to the polypeptide or nucleic acid, and detecting complex formation, if present.

[0014] The invention further provides methods of identifying a compound that modulates the activity of an ORFX polypeptide by contacting ORFX polypeptide with a compound and determining whether the ORFX polypeptide activity is modified.

[0015] The invention is also directed to compounds that modulate ORFX polypeptide activity identified by contacting an ORFX polypeptide with the compound and determining whether the compound modifies activity of the ORFX polypeptide, binds to the ORFX polypeptide, or binds to a nucleic acid molecule encoding an ORFX polypeptide.

[0016] In a another aspect, the invention provides a method of determining the presence of or predisposition of an ORFX-associated disorder in a subject. The method includes providing a sample from the subject and measuring the amount of ORFX polypeptide in the subject sample. The amount of ORFX polypeptide in the subject sample is then compared to the amount of ORFX polypeptide in a control sample. An alteration in the amount of ORFX polypeptide in the subject protein sample relative to the amount of ORFX polypeptide in the control protein sample indicates the subject has a tissue proliferation-associated condition. A control sample is preferably taken from a matched individual, i.e., an individual of similar age, sex, or other general condition but who is not suspected of having a tissue proliferation-associated condition. Alternatively, the control sample may be taken from the subject at a time when the subject is not suspected of having a tissue proliferation-associated disorder. In some embodiments, the ORFX is detected using an ORFX antibody.

[0017] In a further aspect, the invention provides a method of determining the presence of or predisposition of an ORFX-associated disorder in a subject. The method includes providing a nucleic acid sample, e.g, RNA or DNA, or both, from the subject and measuring the amount of the ORFX nucleic acid in the subject nucleic acid sample. The amount of ORFX nucleic acid sample in the subject nucleic acid is then compared to the amount of an ORFX nucleic acid in a control sample. An alteration in the amount of ORFX nucleic acid in the sample relative to the amount of ORFX in the control sample indicates the subject has a tissue proliferation-associated disorder.

[0018] In a still further aspect, the invention provides a method of treating or preventing or delaying an ORFX-associated disorder. The method includes administering to a subject in which such treatment or prevention or delay is desired an ORFX nucleic acid, an ORFX polypeptide, or an ORFX antibody in an amount sufficient to treat, prevent, or delay a tissue proliferation-associated disorder in the subject.

[0019] Unless otherwise defined, all technical and scientific terms used herein have the same meaning as commonly understood by one of ordinary skill in the art to which this invention belongs. Although methods and materials similar or equivalent to those described herein can be used in the practice or testing of the present invention, suitable methods and materials are described below. All publications, patent applications, patents, and other references mentioned herein are incorporated by reference in their entirety. In the case of conflict, the present specification, including definitions, will control. In addition, the materials, methods, and examples are illustrative only and not intended to be limiting. Other features and advantages of the invention will be apparent from the following detailed description and claims.

### DETAILED DESCRIPTION OF THE INVENTION

[0020] Endothelial cells and also other cell types, for example, platelets, are implicated in atherogenesis. Atherogenesis is the process of formation of lesions in blood vessels known as atherosclerotic plaques. These are made of cholesterol and lipid deposits often also containing insoluble calcium, and other components, and can trigger the formation of thrombi.

[0021] As used herein the term “atherogenic” relates to the property of a cell to initiate, accentuate, or be involved in any mechanistic pathway, known or unknown, in the process of atherogenesis. For example such cells or tissues have the potential to develop atherosclerotic plaque. Pathological states leading to atherosclerosis are defined as conditions existing in vivo that encourage, accelerate or sustain the formation of atherosclerotic plaques. As used herein the designation “atherogenic cells” refers to two types of cells, implicated in atherogenesis, that were used for sequence derivation: (1) blood platelets and (2) human umbilical vein endothelial cells (HUVEC). For HUVEC, four different phenotypes or treatments were used. These were HUVEC grown in monolayer (“static”); HUVEC treated with cytokine (“cytokine”); HUVEC grown in collagen gels and which spontaneously form capillary-like tubes (“tube-forming”); and HUVEC subjected to fluid shear stress (“shear”).

[0022] The invention provides novel polypeptides and nucleotides encoded thereby. The polynucleotides and their encoded polypeptides can be grouped according to the functions played by their gene products. Such functions include, structural proteins, proteins from which associated with metabolic pathways fatty acid metabolism, glycolysis, intermediary metabolism, calcium metabolism, proteases, and amino acid metabolism, etc.

[0023] Included in the invention are 1051 novel nucleic acid sequences and their encoded polypeptides, as well as an additional 23 novel nucleic acid sequences. The sequences are collectively referred to as “ORFX nucleic acids” or “ORFX polynucleotides” and the corresponding encoded polypeptides are referred to as “ORFX polypeptides” or “ORFX proteins”. The ORFX polynucleotides and the encoded polypeptides are characterized by having novel sequences that were discovered as a result of SeqCalling™ analysis conducted on human tissues from a broad range of sources. SeqCalling™ is disclosed in U.S. Ser. No. 09/417,386, filed Oct. 13, 1999, incorporated herein by reference in its entirety. Sample preparation for SeqCalling™ can be performed by the sample preparation method described in U.S. Pat. No. 5,871,697 and in Shimkets et al., “Gene expression analysis by transcript profiling coupled to a gene database query” Nature Biotechnology 17:198-803 (1999), incorporated herein by reference in their entireties. In many cases the sequences disclosed herein were assembled using additional SeqCalling™ fragments.

[0024] In the designation “ORFX”, the “X” can take on any of the values from 1 to 1051. For example, an ORFX nucleic acid according to the invention is a nucleic acid including a sequence such as an ORF1 nucleic acid, and an ORFX polypeptide according to the invention is a polypeptide that includes the amino acid sequence of a polypeptide such as an ORF1 polypeptide. Unless indicated otherwise, “ORFX” is meant to refer to any one, several, or all of the ORF1-ORF1051 sequences disclosed herein. The sequences of the nucleic acids of the invention are disclosed in the appended Sequence Listing in SEQ ID NO:1- SEQ ID NO:2n−1, wherein n is an integer between 1-1051, as well as in the Appended Sequence Listing in SEQ ID NOS: 2103-2125; and the sequences of the polypeptides of the invention are disclosed in the appended Sequence Listing in SEQ ID NO: 1- SEQ ID NO:2n, wherein n is an integer between 1-1051.

[0025] Table 1 provides a summary of the ORFX nucleic acids and their encoded polypeptides. Table 1 has six columns whose headings are as follows.

[0026] Column 1 of Table 1, entitled “No.”, provides a serially increasing entry number running from 1 to 1051 identifying the successive rows of the table.

[0027] Column 2 of Table 1, entitled “Sequence Id”, provides an internal identification number for the indicated ORF, along with the SEQ ID NOs.(enclosed in parentheses) corresponding to the indicated ORF and the polypeptide encoded by it.

[0028] Column 3 of Table 1, entitled “Protein Similarity”, lists previously described proteins that are related to polypeptides encoded by the ORFs. GenBank identifiers for the previously described proteins are provided. Information about the previously described proteins can be retrieved from http://www.ncbi.nlm.nih.gov/.

[0029] To determine similarity to previously described proteins, polypeptides encoded by ORFX DNA sequences were tested using the Framesearch Algorithm against a nonredundant version of the GenPept Database from NCBI/GenBank. DNA sequences that had a score of ‘90’ or above (Framesearch algorithm score, Edelman et. al. GCG Genetics) to a known protein were selected. Open reading frames were extended beyond the region of the protein matched using standard DNA translation and codon tables. Novel proteins that lacked a protein match were translated against the standard genetic codons and proteins with an ORF at least 80 amino acids and containing a Methionine start are included in the Table.

[0030] Column 4 of Table 1, entitled “Protein Domain”, lists previously described protein domains, designated by Pfam entries, that are present in the polypeptides encoded by the ORFs, Also included in column 3 are proteins in which these domains are present. The Pfam entries can be retrieved from http://pfam.wustl.edu/. DNA sequences were translated in all six frames and tested using the Hmmer Algorithm against the Pfam Database (References to the algorithm and Pfam database can be found at http://pfam.wustl.edu). Translated DNA sequences that matched a protein domain entry in the Pfam database AND had a score of ‘7.5’ were selected.

[0031] Column 5 of Table 1, entitled “Protein Classification”, lists the classification assigned for the protein, based on its homology. Examples of proteins in the classification include the following:

### Amylases

[0032] Amylase is responsible for endohydrolysis of 1,4-alpha-glucosidic linkages in oligosaccharides and polysaccharides. Variations in amylase gene may be indicative of delayed maturation and of various amylase producing neoplasms and carcinomas.

### Amyloid

[0033] The serum amyloid A (SAA) proteins comprise a family of vertebrate proteins that associate predominantly with high density lipoproteins (HDL). The synthesis of certain members of the family is greatly increased in inflammation. Prolonged elevation of plasma SAA levels, as in chronic inflammation, 15 results in a pathological condition, called amyloidosis, which affects the liver, kidney and spleen and which is characterized by the highly insoluble accumulation of SAA in these tissues. Amyloid selectively inhibits insulin-stimulated glucose utilization and glycogen deposition in muscle, while not affecting adipocyte glucose metabolism. Deposition of fibrillar amyloid proteins intraneuronally, as neurofibrillary tangles, extracellularly, as plaques and in blood vessels, is characteristic of both Alzheimer's disease and aged Down's syndrome. Amyloid deposition is also associated with type II diabetes mellitus.

### Angiopoeitin

[0034] Members of the angiopoietin/fibrinogen family have been shown to stimulate the generation of new blood vessels, inhibit the generation of new blood vessels, and perform several roles in blood clotting. This generation of new blood vessels, called angiogenesis, is also an essential step in tumor growth in order for the tumor to get the blood supply it needs to expand. Variation in these genes may be predictive of any form of heart disease, numerous blood clotting disorders, stroke, hypertension and predisposition to tumor formation and metastasis. In particular, these variants may be predictive of the response to various antihypertensive drugs and chemotherapeutic and anti-tumor agents.

### Apoptosis-related Proteins

[0035] Active cell suicide (apoptosis) is induced by events such as growth factor withdrawal and toxins. It is controlled by regulators, which have either an inhibitory effect on programmed cell death (anti-apoptotic) or block the protective effect of inhibitors (pro-apoptotic). Many viruses have found a way of countering defensive apoptosis by encoding their own anti-apoptosis genes preventing their target-cells from dying too soon. Variants of apoptosis related genes may be useful in formulation of anti-aging drugs.

### Cadherin, Cyclin, Polymerase, Oncogenes, Histones, Kinases

[0036] Members of the cell division/cell cycle pathways such as cyclins, many transcription factors and kinases, DNA polymerases, histones, helicases and other oncogenes play a critical role in carcinogenesis where the uncontrolled proliferation of cells leads to tumor formation and eventually metastasis. Variation in these genes may be predictive of predisposition to any form of cancer, from increased risk of tumor formation to increased rate of metastasis. In particular, these variants may be predictive of the response to various chemotherapeutic and anti-tumor agents.

### Colony-stimulating Factor-related Proteins

[0037] Granulocyte/macrophage colony-stimulating factors are cytokines that act in hematopoiesis by controlling the production, differentiation, and function of 2 related white cell populations of the blood, the granulocytes and the monocytes-macrophages.

### Complement-related proteins

[0038] Complement proteins are immune associated cytotoxic agents, acting in a chain reaction to exterminate target cells to that were opsonized (primed) with antibodies, by forming a membrane attack complex (MAC). The mechanism of killing is by opening pores in the target cell membrane. Variations in 20 complement genes or their inhibitors are associated with many autoimmune disorders. Modified serum levels of complement products cause edemas of various tissues, lupus (SLE), vasculitis, glomerulonephritis, renal failure, hemolytic anemia, thrombocytopenia, and arthritis. They interfere with mechanisms of ADCC (antibody dependent cell cytotoxicity), severely impair immune competence and reduce phagocytic ability. Variants of complement genes may also be indicative of type I diabetes mellitus, meningitis neurological disorders such as nemaline myopathy, neonatal hypotonia, muscular disorders such as congenital myopathy and other diseases.

### Cytochrome

[0039] The respiratory chain is a key biochemical pathway which is essential to all aerobic cells. There are five different cytochromes involved in the chain. These are heme bound proteins which serve as electron carriers. Modifications in these genes may be predictive of ataxia areflexia, dementia and myopathic and neuropathic changes in muscles. Also, association with various types of solid tumors.

### Kinesins

[0040] Kinesins are tubulin molecular motors that function to transport organelles within cells and to move chromosomes along microtubules during cell division. Modifications of these genes may be indicative of neurological disorders such as Pick disease of the brain, tuberous sclerosis.

### Cytokines, Interferon, Interleukin

[0041] Members of the cytokine families are known for their potent ability to stimulate cell growth and division even at low concentrations. Cytokines such as erythropoietin are cell-specific in their growth stimulation; erythropoietin is useful for the stimulation of the proliferation of erythroblasts. Variants in cytokines may be predictive for a wide variety of diseases, including cancer predisposition.

### G-protein Coupled Receptors

[0042] G-protein coupled receptors (also called R7G) are an extensive group of hormones, neurotransmitters, odorants and light receptors which transduce extracellular signals by interaction with guanine nucleotide-binding (G) proteins. Alterations in genes coding for G-coupled proteins may be involved in and indicative of a vast number of physiological conditions. These include blood pressure regulation, renal dysfunctions, male infertility, dopamine associated cognitive, emotional, and endocrine functions, hypercalcemia, chondrodysplasia and osteoporosis, pseudohypoparathyroidism, growth retardation and dwarfism.

### Thioesterases

[0043] Eukaryotic thiol proteases are a family of proteolytic enzymes which contain an active site cysteine. Catalysis proceeds through a thioester intermediate and is facilitated by a nearby histidine side chain; an asparagine completes the essential catalytic triad. Variants of thioester associated genes may be predictive of neuronal disorders and mental illnesses such as Ceroid Lipoffiscinosis, Neuronal 1, Infantile, Santavuori disease and more.

[0044] The key to the molecule type referred to in Table 1 is as follows:

| Abbrev: | Title: |
|---|---|
| amylase | amylase protein |
| amylaseinhib | amylase inhibitor |
| amyloid | amyloid protein |
| apoptosis | apoptosis associated protein |
| apoptosisinhib | apoptosis inhibitors |
| apoptosisrecep | apoptosis receptors |
| ATPase_associated | ATPase associated protein |
| biotindep | biotin dependent enzyme/protein |
| cadherin | cadherin protein |
| calcium_channel | calcium channel protein |
| carboxylase | carboxylase protein |
| cathepsin | cathepsin/carboxypeptidases |
| cathepsininhib | cathepsin/carboxypeptidase inhibitor |
| chloride_channel | chloride channel protein |
| collagen | collagen |
| complement | complement protein |
| complementrecept | complement receptor protein |
| complementinhib | complement inhibitor |
| csf | colony stimulating factor |
| csfrecept | colony stimulating factor receptor |
| cyclin | cyclin protein |
| cyto450 | cytochrome p450 protein |
| cytochrome | cytochrome related protein |
| deaminase | deaminase |
| dehydrogenase | dehydrogenase |
| desaturase | desaturase |
| dna_rna_bind | DNA/RNA binding protein/factor |
| dna_rna_inhib | DNA/RNA binding protein/factor inhibitor |
| dynein | dynein |
| elastase | elastase |
| elastaseinhib | elastase inhibitor |
| eph | EPH family of tyrosine kinases |
| esterase | esterase |
| esteraseinhib | esterase inhibitor |
| fgf | fibroblast growth factor |
| fgfreceptor | fibroblast growth factor receptor |
| gaba | GABA receptor |
| glucoamylase | glucoamylase |
| glucoronidase | glucoronidase |
| glycoprotein | glycoprotein |
| Guanylyl | guanylylate cyclase |
| helicase | helicase |
| histone | histone |
| HOM | homologous |
| homeobox | homeobox protein |
| hydrolase | hydrolase |
| hydroxysteroid | hydroxysteroid associated protein |
| hypoxanthine | hypoxanthine associated protein |
| immunoglob | immunoglobulin |
| immunoglobrecept | immunoglobulin receptor |
| interferon | interferon |
| interleukin | interleukin |
| interleukinrecept | interleukin receptor |
| isomerase | isomerase |
| isomeraseinhibitor | isomerase inhibitor |
| isomerasereceptor | isomerase receptor |
| kinase | kinase |
| kinaseinhibitor | kinase inhibitor |
| kinasereceptor | kinase receptor |
| kinesin | kinesin |
| laminin | laminin associated protein |
| lipase | lipase |
| metallothionein | metallothionein |
| MHC | major histocompatibility complex |
| misc_channel | miscellaneous channel |
| ngf | nerve growth factor |
| nuci_recpt | nuclear receptor |
| nuclease | nuclease |
| oncogene | oncogene associated protein |
| oxidase | oxidase |
| oxygenase | oxygenase |
| peptidase | peptidase |
| peroxidase | peroxidase |
| phosphatase | phosphatase |
| phosphataseinhib | phosphatase inhibitor |
| phosphorylase | phosphorylase |
| PIR | PIR DATABASE (release 56, 29-OCT-1998) |
| polymerase | polymerase |
| potassium_channel | potassium channel protein |
| prostaglandin | prostaglandin |
| protease | protease |
| proteaseinhib | protease inhibitor |
| reductase | reductase |
| ribosomalprot | ribosomal associated protein |
| RTR | EMBLDATABASE translated entries not to be |
| | incorporated into SWISS-PROT (20-JUL-1998) |
| SIM | similar |
| SPTR | EMBL DATABASE translated entries to be |
| | incorporated into SWISS-PROT (20-JUL-1998) |
| struct | structural associated protein |
| sulfotransferase | sulfotransferase |
| SWP | SWISS-PROT DATABASE (release 18-OCT-1998) |
| SWPN | SWISS-PROT Update (release 11-NOV-98) |
| synthase | synthase |
| tgf | transforming growth factor |
| tgfreceptor | transforming growth factor receptor |
| thioesterase | thioesterase |
| thiolase | thiolase |
| tm7 | seven transmembrane domain G-protein |
| | coupled receptor |
| tnf | necrosis factor receptor |
| traffic | tumor necrosis factor |
| tnfreceptor | tumor trafficking associated protein |
| TRN | EMBL DATABASE translated entries update |
| | (20-JUL-1998) |
| transcriptfactor | transcription factor |
| transferase | transferase |
| transport | transport protein |
| tubulin | tubulin |
| ubiquitin | ubiquitin |
| unclassified | Protein not categorized into one of the |
| | aforementioned protein families |
| water channel | water channel protein |

[0045] Column 6 of Table 1, entitled, “Tissue Expression”, denotes tissues, represented by four-digit numbers, in which RNA segments giving rise to the SeqCalling™ fragments used to assemble each ORF nucleic acid sequences is present. Tissues or cells corresponding to the numbers are provided in Table 2.

TABLE 1

| | | | | Protein | |
|---|---|---|---|---|---|
| No. | Sequence Id | Protein Similarity | Protein Domain | Classification | Tissue Expression |
| 1 | 87939879 | Novel Protein sim. GBank | | amylase | 1022 |
| | (389, 390) | gi\|1722997\|sp\|Q10769\|Y043_MYCTU - HYPOTHETICAL | | | |
| | | 64.1 KD PROTEIN CY48.03 | | | |
| 2 | 100379019 | Novel Protein sim. GBank gi\|2950464\|emb\|CAA17814\| - | Contains protein domain | ATPase_associated | 1022, 1040 |
| | (1893, 1894) | (AL022071) hypothetical protein [Schizosaceharomyces | (PF00514) - Armadillo/ | | |
| | | pombe] | beta-catenin-like repeats | | |
| 3 | 100342944 | Novel Protein sim. GBank gi\|2760163\|dbj\|BAA24185\| - | | ATPase_associated | 1021, 1022, 1030, |
| | (1995, 1996) | (AB010055) outer arm dynein light chain 1 [Anthocidaris | | | 1040 |
| | | crassispina] | | | |
| 4 | 87942280 | Novel Protein sim. GBank | | ATPase_associated | 1022 |
| | (657, 658) | gi\|2829617\|sp\|P74323\|Y951_SYNY3 - HYPOTHETICAL | | | |
| | | 24.6 KD PROTEIN SLR0951 | | | |
| 5 | 100397727 | Novel Protein sim. GBank gi\|3873551\|emb\|CAA22128\| - | | ATPase_associated | 1022, 1030, 1040, |
| | (1203, 1204) | (AL033534) putative vacuolar protein sorting protein | | | 1041 |
| | | subunit [Schizosaccharomyces pombe] | | | |
| 6 | 87940285 | Novel Protein sim. GBank gi\|3947712\|emb\|CAA77027\| - | | cadherin | 1022 |
| | (1861, 1862) | (Y18101) macrophage actin-associated-tyrosine- | | | |
| | | phosphorylated protein [Mus musculus] | | | |
| 7 | 100340745 | Novel Protein sim. GBank | | carboxylase | 1000, 1002, 1010, |
| | (1615, 1616) | gi\|5080779\|gb\|AAD39289.1\|AC00757 - (AC007576) | | | 1011, 1012, 1013, |
| | | Putative ribulose-1,5 bisphosphate carboxylase/oxygenase | | | |
| | | large subunit N-methyltransferase [Arabidopsis thaliana] | | | 1014, 1022, 1024, |
| | | | | | 1026, 1030, 1033, |
| | | | | | 1037, 1039, 1040, |
| | | | | | 1041, 1042 |
| 8 | 100391893 | Novel Protein sim. GBank gi\|2388676 (AF015539) - | | collagen | 1022, 1040 |
| | (813, 814) | precollagen P [Mytilus edulis] | | | |
| 9 | 87941415 | Novel Protein sim. GBank | | collagen | 1022 |
| | (625, 626) | gi\|5524667\|gb\|AAD44333.1\|AF15935 - (AF159356) | | | |
| | | Munc 13-4 protein [Rattus norvegicus] | | | |
| 10 | 100387665 | Novel Protein sim. GBank gi\|81286\|pir\|\|S22697 - extensin - | | collagen | 1000, 1005, 1006, |
| | (1019, 1020) | Volvox carteri (fragment) | | | 1011, 1012, 1014, |
| | | | | | 1022, 1024, 1030, |
| | | | | | 1033, 1040, 1041, |
| | | | | | 1042 |
| 11 | 100416813 | Novel Protein sim. GBank | Contains protein domain | cyto450 | 1014, 1022, 1033, |
| | (1051, 1052) | gi\|4503227\|ref\|NP_000766.1\|pCYP2 - cytochrome P450, | (PF00067) - | | 1042 |
| | | subfamily IIJ (arachidonic acid epoxygenase) polypeptide 2 | Cytochrome P450 | | |
| 12 | 100400865 | Novel Protein sim. GBank | Contains protein domain | dehydrogenase | 1022, 1026, 1030, |
| | (1223, 1224) | gi\|3913470\|sp\|O57314\|DHBX_ANAPL - PUTATIVE | (PF00106) - short chain | 1040 | |
| | | STEROID DEHYDROGENASE SPM2 | dehydrogenase | | |
| 13 | 87939579 | Novel Protein sim. GBank | Contains protein domain | dehydrogenase | 1022 |
| | (347, 348) | gi\|3024771\|sp\|Q51945\|TTUC_PSEPU - TARTRATE | (PF00180) - Isocitrate and | | |
| | | DEHYDROGENASE (TDH) | isopropylmalate | | |
| | | | dehydrogenases | | |
| 14 | 8792915 | Novel Protein sim. GBank gi\|322228\|pir\|\|S32227 - | Contains protein domain | dehydrogenase | 1022 |
| | (157, 158) | glutamate dehydrogenase (NADP+) (EC 1.4.1.4) - | (PF00208) - Glutamate/ | | |
| | | Corynebacterium glutamicum | Leucine/Phenylalanine/ | | |
| | | | Valine dehydrogenase | | |
| 15 | 87940621 | Novel Protein sim. GBank gi\|5042274\|emb\|CAB44528.1\| - | Contains protein domain | dehydrogenase | 1022 |
| | (543, 544) | (AL078618) nuoD, NADH dehydrogenase subunit | (PF00346) - Respiratory- | | |
| | | [Streptomyces coelicolor] | chain NADH dehydro- | | |
| | | | genase, 49 Kd subunit | | |
| 16 | 87941512 | Novel Protein sim. GBank | Contains protein domain | dehydrogenase | 1022 |
| | (635, 636) | gi\|1709414\|sp\|P50973\|NUON_RHOCA - NADH | (PF00361) - NADH- | | |
| | | DEHYDROGENASE 1 CHAIN N (NADH-UBIQUINONE | Ubiquinone/plastoquinone | | |
| | | OXIDOREDUCTASE CHAIN 14) (NUO14) | (complex I), various chains | | |
| 17 | 87917008 | Novel Protein sim. GBank gi\|5459404\|emb\|CAB50762.1\| - | Contains protein domain | dehydrogenase | 1022 |
| | (413, 414) | (AL096839) putative glucose-6-phosphate 1-dehydrogenase | (PF00479) - Glucose-6- | | |
| | | [Streptomyces coelicolor] | phosphate dehydrogenase | | |
| 18 | 87940884 | Novel Protein sim. GBank gi\|343695 (M74159) - NADH | Contains protein domain | dehydrogenase | 1022 |
| | (613, 614) | dehydrogenase (ubiquinone) subunit 5 [Triticum aestivum] | (PF00662) - NADH- | | |
| | | | Ubiquinone oxidoreductase | (complex I), chain 5 | |
| | | | N-terminus | | |
| 19 | 87940409 | Novel Protein sim. GBank | | dehydrogenase | 1022 |
| | (513, 514) | gi\|118677\|sp\|P09063\|DLD1_PSEPU - LIPOAMIDE | | | |
| | | DEHYDROGENASE COMPONENT OF BRANCHED- | | | |
| | | CHAIN ALPHA-KETO ACID DEHYDROGENASE | | | |
| | | COMPLEX (E3) (DIHYDROLIPOAMIDE | | | |
| | | DEHYDROGENASE) (LPD-VAL) | | | |
| 20 | 87934383 | Novel Protein sim. GBank | | dehydrogenase | 1022 |
| | (83, 84) | gi\|1351979\|sp\|P43904\|AROE_PSEAE - SHIKIMATE 5- | | | |
| | | DEHYDROGENASE | | | |
| 21 | 87940573 | Novel Protein sim. GBank | | dehydrogenase | 1022 |
| | (535, 536) | gi\|137172\|sp\|PO8390\|USG_ECOLI - USG-1 PROTEIN | | | |
| 22 | 87941779 | Novel Protein sim. GBank gi\|1561730 (U65491) - Dreg-3 | | dehydrogenase | 1022 |
| | (105, 106) | protein [Drosophila melanogaster] | | | |
| 23 | 87917194 | Novel Protein sim. GBank gi\|1620508 (U60056) - CbbBc | | dehydrogenase | 1022 |
| | (487, 488) | [Ralstonia eutropha] | | | |
| 24 | 87921311 | Novel Protein sim. GBank | | dehydrogenase | 1022 |
| | (329, 330) | gi\|1709397\|sp\|P50368\|NU5M_SCHCO - NADH- | | | |
| | | UBIQUINONE OXIDOREDUCTASE CHAIN 5 | | | |
| 25 | 87940475 | Novel Protein sim. GBank gi\|1877028\|dbj\|BAA12222\| - | | dehydrogenase | 1022 |
| | (521, 522) | (D84102) 2-oxoglutarate dehydrogenase [Corynebacterium | | | |
| | | glutamicum] | | | |
| 26 | 87940428 | Novel Protein sim. GBank gi\|1946287\|emb\|CAA72285.1\| - | | dehydrogenase | 1022 |
| | (515, 516) | (Y11520) enoyl-CoA hydratase [Pseudomonas sp.] | | | |
| 27 | 87923374 | Novel Protein sim. GBank | | dehydrogenase | 1022 |
| | (383, 384) | gi\|231985\|sp\|P30234\|DHA_MYCTU - ALANINE | | | |
| | | DEHYDROGENASE (40 KD ANTIGEN) | | | |
| 28 | 87932980 | Novel Protein sim. GBank gi\|2695834\|emb\|CAA15904\| - | | dehydrogenase | 1022 |
| | (79, 80) | AL021006) sucA [Mycobacterium tuberculosis] | | | |
| 29 | 87940593 | Novel Protein sim. GBank gi\|2695834\|emb\|CAA15904\| - | dehydrogenase | 1022 | |
| | (541, 542) | (AL021006) sucA [Mycobacterium tuberculosis] | | | |
| 30 | 87933626 | Novel Protein sim. GBank gi\|4154555 (AE001444) - | | dehydrogenase | 1022 |
| | (591, 592) | Proline/pyrroline-5-carboxylate dehydrogenase | | | |
| | | [Helicobacter pylori J99] | | | |
| 31 | 87942978 | Novel Protein sim. GBank gi\|66051\|pir\|\|DEECOG - | | dehydrogenase | 1022 |
| | (65, 66) | oxoglutarate dehydrogenase (lipoamide) (EC 1.2.4.2) - | | | |
| | | Escherichia coli | | | |
| 32 | 100400366 | Novel Protein sim. GBank gi\|3417297 (AC002310) - | Contains protein domain | dna_rna_bind | 1022, 1030, 1040 |
| | (1043, 1044) | Unknown gene product [Homo sapiens] | (PF00096) - | | |
| | | | Zinc finger, C2H2 type | | |
| 33 | 100393720 | Novel Protein sim. GBank gi\|3702137\|emb\|CAA20564\| - | Contains protein domain | dna_rna_bind | 1013, 1022, 1024, |
| | (2017, 2018) | (AL031393) dJ733D15.1 (Zinc-finger protein) [Homo | (PF00096) - | | 1030, 1041, 1042 |
| | | sapiens] | Zinc finger, C2H2 type | | |
| 34 | 100417317 | Novel Protein sim. GBank gi\|1363912\|pir\|\|JC4296 - ring | Contains protein domain | dna_rna_bind | 1022, 1040, 1042 |
| | (2037, 2038) | finger protein - fruit fly (Drosophila melanogaster) | (PF00097) - | | |
| | | Zinc finger, C3HC4 type | | | |
| | | | (RiNG finger) | | |
| 35 | 87940577 | Novel Protein sim. GBank gi\|2564960 (L13845) - DNA- | Contains protein domain | dna_rna_bind | 1022 |
| | (537, 538) | binding protein; ORF3; putative [Sinorhizobium meliloti] | (FF01381) - | | |
| | | | Helix-turn-helix | | |
| 36 | 87942467 | Novel Protein sim. GBank gi\|2911067\|emb\|CAA17529.1\| - | | dna_rna_bind | 1022 |
| | (119, 120) | (AL021960) UV-damaged DNA-binding protein-like | | | |
| | | [Arabidopsis thaliana] | | | |
| 37 | 87919652 | Novel Protein sim. GBank gi\|1173539 (U30473) - putative | Contains protein domain | eph | 1022 |
| | (951, 952) | src-like adapter protein; non-catalytic src-like adapter | (PF00017) - | | |
| | | protein containing SH3 and SH2 domains; homolog of | Src homology domain 2 | | |
| | | mouse SLAP; Method: conceptual translation supplied by | | | |
| | | author [Homo sapiens] | | | |
| 38 | 100393471 | Novel Protein sim. GBank gi\|1173539 (U30473) - putative | Contains protein domain | eph | 1022, 1040 |
| | (1915, 1916) | src-like adapter protein; non-catalytic src-like adapter | (PF00017) - | | |
| | | protein containing SH3 and SH2 domains; homolog of | Src homology domain 2 | | |
| | | mouse SLAP; Method: conceptual translation supplied by | | | |
| | | author [Homo sapiens] | | | |
| 39 | 87919659 | Novel Protein sim. GBank gi\|1363239\|pir\|\|A57152 - src-like | Contains protein domain | eph | 1022 |
| | (953, 954) | adaptor protein - mouse | (PF00017) - | | |
| | | | Src homology domain 2 | | |
| 40 | 87931622 | Novel Protein sim. GBank gi\|545100\|bbs\|142990 - Shb = | Contains protein domain | eph | 1022 |
| | (427, 428 | Src homology 2 protein [mice, Peptide Partial, 309 aa] | (PF00017) - | | |
| | | | Src homology domain 2 | | |
| 41 | 101330077 | Novel Protein sim. GBank gi\|4200446 (AF102777) - FYVE | Contains protein domain | eph | 1022, 1030 |
| | (1683, 1684) | finger-containing phosphoinositide kinase [Mus musculus] | (PF01363) - | | |
| | | | FYVE zinc finger | | |
| 42 | 87939296 | Novel Protein sim. GBank gi\|3560150\|emb\|CAA20737\| - | | eph | 1022 |
| | (315, 316) | (AL031534) Chaperonin hsp78p [Schizosaceharomyces | | | |
| | | pombe] | | | |
| 43 | 100403240 | Novel Protein sim. GBank gi\|108854\|pir\|\|S14113 - 1- | Contains protein domain | esterase | 1022, 1030, 1033, |
| | (1333, 1334) | phosphatidylinositol-4,5-bisphosphate phosphodiesterase | (PF00168) - C2 domain | | 1040, 1042 |
| | | (EC 3.1.4.11) delta-2-bovine | | | |
| 44 | 100390588 | Novel Protein sim. GBank gi\|79960\|pir\|\|JH0204 - | | esterase | 1013, 1014, 1022, |
| | (1529, 1530) | hypothetical 30.5K protein - Enterococcus faecalis plasmid | | | 1039, 1041, 1042 |
| | | pAM-beta-1 | | | |
| 45 | 87914668 | Novel Protein sim. GBank | Contains protein domain | glycoprotein | 1022 |
| | (1699, 1700) | gi\|137116\|sp\|P07911\|UROM_HUMAN - UROMODULIN | (PF00008) - EGF-like | | |
| | | PRECURSOR (TAMM-HORSFALL URINARY | domain | | |
| | | GLYCOPROTEIN) (THP) | | | |
| 46 | 87935916 | Novel Protein sim. GBank | Contains protein domain | glycoprotein | 1022 |
| | (163, 164) | gi\|728877\|sp\|P41142\|ARCA_PSEPU - ARGININE | (PF00185) - | | |
| | | DEIMINASE | carbamoyltransferase | Aspartate/ornithine | |
| 47 | 87941125 | Novel Protein sim. GBank | | glycoprotein | 1022 |
| | (551, 552) | gi\|131411\|sp\|P23853\|PSPA_ECOLI -PHAGE SHOCK | | | |
| | | PROTEIN A | | | |
| 48 | 100401622 | Novel Protein sim. GBank | | glycoprotein | 1014, 1022, 1040 |
| | (1243, 1244) | gi\|2499087\|sp\|Q09332\|UGGG_DROME - UDP- | | | |
| | | GLUCOSE:GLYCOPROTEIN | | | |
| | | GLUCOSYLTRANSFERASE PRECURSOR (DUGT) | | | |
| 49 | 87917038 | Novel Protein sim. GBank | | glycoprotein | 1022 |
| | (415, 416) | gi\|462317\|sp\|Q01723\|HRPH_PSESY - | | | |
| | | HYPERSENSITIVITY RESPONSE SECRETION | | | |
| | | PROTEIN HRPH PRECURSOR | | | |
| 50 | 87916575 | Novel Protein sim. GBank | Contains protein domain | helicase | 1022 |
| | (477, 478) | gi\|1706438\|sp\|Q10640\|DNG_MYCTU - PROBABLE | (PF00270) - DEAD/DEAH | | |
| | | ATP-DEPENDENT HELICASE DING HOMOLOG | box helicase | | |
| 51 | 100399126 | | Contains protein domain | helicase | 1022, 1030, 1040 |
| | (1211, 1212) | | (PF00646) - F-box domain. | | |
| 52 | 87942798 | Novel Protein sim. GBank | | helicase | 1022 |
| | (35, 36) | gi\|172894\|sp\|P43809\|RECG_HAEIN - ATP-DEPENDENT | | | |
| | | DNA HELICASE RECG | | | |
| 53 | 87933734 | Novel Protein sim. GBank gi\|1742299\|dbj\|BAA15025\| - | | helicase | 1022 |
| | (81, 82) | (D90779) ATP-dependent helicase HrpA homolog. | | | |
| | | [Escherichia coli] | | | |
| 54 | 87942839 | Novel Protein sim. GBank | | helicase | 1022 |
| | (43, 44) | gi\|267520\|sp\|P29741\|YOM1_PHOPR - PUTATIVE ATP- | | | |
| | | DEPENDENT HELICASE IN OMPH 5′REGION (ORF1) | | | |
| 55 | 87940897 | Novel Protein sim. GBank gi\|2959407\|emb\|CAA17948\| - | | helicase | 1022 |
| | (615, 616) | (AL022118) replicative DNA helicase DnaB | | | |
| | | [Mycobacterium leprae] | | | |
| 56 | 87943011 | Novel Protein sim. GBank gi\|3282821 (AF045058) - DnaC | | helicase | 1022 |
| | (663, 664) | replicative helicase [Bacillus mojavensis] | | | |
| 57 | 87934917 | Novel Protein sim. GBank | | homeobox | 1022 |
| | (977, 978) | gi\|3024124\|sp\|P97368\|MEI3_MOUSE - HOMEOBOX | | | |
| | | PROTEIN MEIS3 (MEIS1-RELATED PROTEIN 2) | | | |
| 58 | 87940154 | Novel Protein sim. GBank | Contains protein domain | hydrolase | 1022 |
| | (439, 440) | gi\|2498447\|sp\|P74755\|HIS2_SYNY3 - | (PF01502) - | | |
| | | PHOSPHORIBOSYL-AMP CYCLOHYDROLASE/ | Phosphoribosyl-AMP | | |
| | | PHOSPHORIBOSYL-ATP | cyclohydrolase | | |
| | | PYROPHOSPHOHYDROLASE | | | |
| 59 | 100401134 | Novel Protein sim. GBank | Contains protein domain | hydrolase | 1012, 1022, 1028, |
| | (1149, 1150) | gi\|3913489\|sp\|O67802\|DLHH_AQUAE - PUTATIVE | (PF01738) - Dienelactone | | 1030, 1040, 1041 |
| | | CARBOXYMETHYLENEBUTENOLIDASE | hydrolase family | | |
| | | (DIENELACTONE HYDROLASE) (DLH) | | | |
| 60 | 87933297 | Novel Protein sim. GBank | | hydrolase | 1022 |
| | (507, 508) | gi\|115890\|sp\|P06621\|CBPG_PSES6 - | | | |
| | | CARBOXYPEPTIDASE G2 PRECURSOR (FOLATE | | | |
| | | HYDROLASE G2) (PTEROYLMONOGLUTAMIC ACID | | | |
| | | HYDROLASE G2) (GLUTAMATE | | | |
| | | CARBOXYPEPTIDASE) | | | |
| 61 | 87917150 | Novel Protein sim. GBank gi\|4468678\|emb\|CAB38132.1\| - | Contains protein domain | isomerase | 1022 |
| | (483, 484) | (AL035591) glucose-6-phosphate isomerase [Streptomyces | (PF00342) - | | |
| | | coelicolor] | Phosphoglucose isomerase | | |
| 62 | 87941451 | Novel Protein sim. GBank gi\|4468678\|emb\|CAB38132.1\| - | Contains protein domain | isomerase | 1022 |
| | (631, 632) | (AL035591) glucose-6-phosphate isomerase [Streptomyces | (PF00342) - | | |
| | | coelicolor] | Phosphoglucose isomerase | | |
| 63 | 100390566 | Novel Protein sim. GBank gi\|1938429\|gb\|AAB52266.1\| - | | isomerase | 1011, 1014, 1016, |
| | (1527, 1528) | (U97002) similar to Schizosaccharomyces pombe 4- | | | 1021, 1022, 1025, |
| | | nitrophenylphosphatase (PNPPASE) (SP:Q00472, | | | 1026, 1029, 1030, |
| | | NID:g5004) [Caenorhabditis elegans] | | | 1033, 1040, 1041, |
| | | | | | 1042 |
| 64 | 100403250 | Novel Protein sim. GBank gi\|283815\|pir\|\|S23468 - oocyte- | | isomerase | 1022, 1030, 1037, |
| | (1335, 1336) | specific protein P100 - African clawed frog | | | 1039 |
| 65 | 87940025 | Novel Protein sim. GBank gi\|4185543 (AF108766) - YbaU | | isomerase | 1022 |
| | (397, 398) | [Rhodobacter sphaeroides] | | | |
| 66 | 87932261 | Novel Protein sim. GBank | | isomerase | 1022 |
| | (429, 430) | gi\|544465\|sp\|P35885\|GYRA_STRCO - DNA GYRASE | | | |
| | | SUBUNIT A | | | |
| 67 | 87916892 | Novel Protein sim. GBank gi\|1806130\|emb\|CAA71714\| - | Contains protein domain | kinase | 1022 |
| | (2063, 2064) | (Y10725) protein kinase [Mus musculus] | (PF00069) - Eukaryotic | | |
| | | | protein kinase domain | | |
| 68 | 100341691 | Novel Protein sim. GBank gi\|3702958 (AF077659) - | Contains protein domain | kinase | 1022, 1040 |
| | (811, 812) | homeodomain-interacting protein kinase 2 [Mus musculus] | (PF00069) - Eukaryotic | | |
| | | | protein kinase domain | | |
| 69 | 100391786 | Novel Protein sim. GBank | Contains protein domain | kinase | 1013, 1014, 1022, |
| | (1771, 1772) | gi\|462451\|sp\|P34244\|KKK1_YEAST - PROBABLE | (PF00069) - Eukaryotic | 1024, 1026, 1030, | |
| | | SERINE/THREONINE-PROTEIN KINASE YKL101W | protein kinase domain | 1040, 1042 | |
| 70 | 100340713 | Novel Protein sim. GBank gi\|2822161 (AC004082) - rab3 | Contains protein domain | kinase | 1022, 1040 |
| | (789, 790) | effector-like; 35% Similarity to AF007836 (PID:g2317778) | (PF00168) - C2 domain | | |
| | | [Homo sapiens] | | | |
| 71 | 87933279 | Novel Protein sim. GBank gi\|3287696 (AC003979) - Strong | Contains protein domain | kinase | 1022 |
| | (1979, 1980) | similarity to phosphoribosylanthranilate transferase | (PF00168) - C2 domain | | |
| | | gb\|D86180 from Pisum sativum. This ORF may be part of a | | | |
| | | larger gene that lies in the overlapping region. [Arabidopsis | | | |
| | | thaliana] | | | |
| 72 | 100397279 | Novel Protein sim. GBank | Contains protein domain | kinase | 1006, 1022, 1030, |
| | (683, 684) | gi\|5524667\|gb\|AAD44333.1\|AF15935 - (AF159356) | (PF00168) - C2 domain | | 1042 |
| | | Munc 13-4 protein [Rattus norvegicus] | | | |
| 73 | 87916610 | Novel Protein sim. GBank gi\|2661698\|emb\|CAA158021\| - | Contains protein domain | kinase | 1022 |
| | (481, 482) | (AL009204) putative thimidine kinase [Streptomyces | (PF00265) - Thymidine | | |
| | | coelicolor] | kinases | | |
| 74 | 87942987 | Novel Protein sim. GBank gi\|1363065\|pir\|\|A53206-6- | Contains protein domain | kinase | 1022 |
| | (67, 68) | phosphofructokinase (EC 2.7.1.11) C - rabbit | (PF00365) - | | |
| | | | Phosphofructokinase | | |
| 75 | 87931951 | Novel Protein sim. GBank gi\|4204896 (U57100) - erythritol | Contains protein domain | kinase | 1022 |
| | (581, 582) | kinase [Brucella abortus] | (PF00370) - FGGY family | | |
| | | | of carbohydrate kinases | | |
| 76 | 100340817 | Novel Protein sim. GBank gi\|3790389\|gb\|AAD04756\| - | Contains protein domain | kinase | 1006, 1022, 1042 |
| | (1619, 1620) | (U92072) m-tomosyn [Rattus norvegicus] | (PF00400) - WD domain, | | |
| | | | G-beta repeat | | |
| 77 | 100403017 | Novel Protein sim. GBank | Contains protein domain | kinase | 1022, 1040, 1042 |
| | (1261, 1262) | gi\|5031817\|ref\|NP_005877.1\|pKAT\| - katanin (80 kDa) | (PF00400) - WD domain, | | |
| | | | G-beta repeat | | |
| 78 | 87915816 | Novel Protein sim. GBank gi\|2052193\|emb\|CAA62003\| - | Contains protein domain | kinase | 1022 |
| | (473, 474) | (X89964) glucokinase [Renibacterium salmoninarum] | (PF00480) - ROK family | | |
| 79 | 87940927 | Novel Protein sim. GBank gi\|1084969\|pir\|\|S55034 - sulfate | Contains protein domain | kinase | 1022 |
| | (95, 96) | adenylytransferase (EC 2.7.7.4) - Emericella nidulans | (PF01583) - Adenylyl- | | |
| | | | sulfate kinase | | |
| 80 | 87934320 | Novel Protein sim. GBank gi\|1401270 (U59741) - RcaE | | kinase | 1022 |
| | (611, 612) | [Fremyella diplosiphon] | | | |
| 81 | 87938165 | Novel Protein sim. GBank gi\|1907331 (U87316)- orfl; | | kinase | 1022 |
| | (233, 234) | putative [Methylobacterium extorguens] | | | |
| 82 | 87937820 | Novel Protein sim. GBank gi\|1929056\|emb\|CAA72805\| - | | kinase | 1022 |
| | (1453, 1454) | (Y12090) putative 3,4-dihydroxy-2-butanone kinase | | | |
| | | [Lycopersicon esculentum] | | | |
| 83 | 87943015 | Novel Protein sim. GBank gi\|2765035\|emb\|CAA71030\| - | | kinase | 1022 |
| | (665, 666) | (Y09899) sensory histidine protein kinase [Calothrix | | | |
| | | viguieri] | | | |
| 84 | 87943055 | Novel Protein sim. GBank gi\|2765035\|emb\|CAA71030) - | | kinase | 1022 |
| | (675, 676) | (Y09899) sensory histidine protein kinase [Calothrix | | | |
| | | viguieri] | | | |
| 85 | 87920435 | Novel Protein sim. GBank | | kinase | 1022 |
| | (1431, 1432) | gi\|3122310\|sp\|Q63450\|KCC1_RAT - | | | |
| | | CALCIUM/CALMODULIN-DEPENDENT PROTEIN | | | |
| | | KINASE TYPE I (CAM KINASE I) | | | |
| 86 | 87936418 | Novel Protein sim. GBank gi\|3261674\|emb\|CAB05444\| - | | kinase | 1022 |
| | (175, 176) | (Z83018) ppk [Mycobacterium tuberculosis] | | | |
| 87 | 87932921 | Novel Protein sim. GBank gi\|3953516\|dbj\|BAA34717\| - | | kinase | 1022 |
| | (77, 78) | (AB002529) sensor kinase rtpA [Pseudomonas tolaasii] | | | |
| 88 | 87942143 | Novel Protein sim. GBank gi\|4539560\|emb\|CAB38479.1\| - | | kinase | 1022 |
| | (645, 646) | (AL035636) integral membrane protein with kinase activity | | | |
| | | [Streptomyces coelicolor] | | | |
| 89 | 87923981 | Novel Protein sim. GBank | | kinase | 1022 |
| | (2071, 2072) | gi\|728831\|sp\|P39188\|ALU1_HUMAN - !!!! ALU | | | |
| | | SUBFAMILY J WARNING ENTRY !!!! | | | |
| 90 | 87934767 | Novel Protein sim. GBank | Contains protein domain | kinaseinhibitor | 1022 |
| | (969, 970) | gi\|123228\|sp\|P17277\|HXA4_CHICK - HOMEOBOX | (PF00023) - Ank repeat | | |
| | | PROTEIN HOX-A4 (CHOX-1.4) | | | |
| 91 | 100397056 | Novel Protein sim. GBank gi\|3168891 (AF068716) - | Contains protein domain | kinasereceptor | 1000, 1022, 1033, |
| | (1039, 1040) | contains similarity to repeated leucine-rich (LRRa) domains | (PF00560) - Leucine Rich | 1040, 1042 | |
| | | [Caenorhabditis elegans] | Repeat | | |
| 92 | 87941097 | Novel Protein sim. GBank gi\|4049528\|emb\|CAA22555\| - | | lipase | 1022 |
| | (469, 470) | (AL034565) putative abhydrolase [Schizosaccharomyces | | | |
| | | pombe] | | | |
| 93 | 87915966 | Novel Protein sim. GBank gi\|4757008\|emb\|CAB42081.1\| - | | MHC | 1022 |
| | (2051, 2052) | (Z93783) dJ377F16.1 (PUTATIVE novel protein) [Homo | | | |
| | | sapiens] | | | |
| 94 | 100393091 | Novel Protein sim. GBank gi\|5262748\|emb\|CAB45688.1\| - | | MHC | 1010, 1022, 1030, |
| | (1677, 1678) | (AJ133120) Proline rich synapse associated protein 2 | | | 1040 |
| | | [Rattus norvegicus] | | | |
| 95 | 100341151 | Novel Protein sim. GBank gi\|3868778\|dbj\|BAA34216\| - | Contains protein domain | misc_channel | 1022, 1040 |
| | (767, 768) | (AB005549) atypical PKC specific binding protein [Rattus | (PF00595) - PDZ domain | | |
| | | norvegicus] | (Also known as DHR or | | |
| | | | GLGF). | | |
| 96 | 87936920 | Novel Protein sim. GBank gi\|3878145\|emb\|CAA99871\| - | | misc_channel | 1022 |
| | (1451, 1452) | (Z75543) similar to potassium channel protein | | | |
| | | [Caenorhabditis elegans] | | | |
| 97 | 87917979 | Novel Protein sim. GBank gi\|106322\|pir\|\|B34087 - | | nuclease | 1022 |
| | (1159, 1160) | hypothetical protein (L1H 3′ region) - human | | | |
| 98 | 87918606 | Novel Protein sim. GBank gi\|1237256 (M18247) - gag-pol | | nuclease | 1022 |
| | (133, 134) | precursor polyprotein gPr80 [Feline leukemia virus] | | | |
| 99 | 87938381 | Novel Protein sim. GBank | | nuclease | 1022 |
| | (1461, 1462) | gi\|126296\|sp\|P08548\|LIN1_NYCCO - LINE-1 REVERSE | | | |
| | | TRANSCRIPTASE HOMOLOG | | | |
| 100 | 87929751 | Novel Protein sim. GBank | | nuclease | 1022 |
| | (257, 258) | gi\|135243\|sp\|P05104\|T2P7_PSEAE - TYPE II | | | |
| | | RESTRICTION ENZYME PAER7I (ENDONUCLEASE | | | |
| | | PAER7I) (R.PAER7I) | | | |
| 101 | 87941007 | Novel Protein sim. GBank gi\|2072964 (U93569) - putative | | nuclease | 1022 |
| | (1865, 1866) | p150 [Homo sapiens] | | | |
| 102 | 100394682 | Novel Protein sim. GBank gi\|2072977 (U93574) - putative | | nuclease | 1012, 1013, 1014, |
| | (2021, 2022) | p150 [Homo sapiens] | | | 1022, 1025, 1040, |
| | | | | | 1041 |
| 103 | 87937594 | Novel Protein sim. GBank gi\|2731432 (U73302) - RNAse T | | nuclease | 1022 |
| | (211, 212) | [Pasteurella haemolytica] | | | |
| 104 | 87925657 | Novel Protein sim. GBank gi\|92728\|pir\|\|PH0217 - reverse | | nuclease | 1022 |
| | (707, 708) | transcriptase-like protein - rat (fragment) | | | |
| 105 | 100399978 | Novel Protein sim. GBank | Contains protein domain | oncogene | 1022, 1025 |
| | (1549, 1550) | gi\|5670251\|gb\|AAD466S3.1\|AF16448 - (AF164486) Notch | (PF00008) - EGF-Iike | | |
| | | 3 protein [Rattus norvegicus] | domain | | |
| 106 | 87914724 | Novel Protein sim. GBank | Contains protein domain | oncogene | 1022 |
| | (1811, 1812) | gi\|1710022\|sp\|P51156\|RB26_RAT - RAS-RELATED | (PF00071) - Ras family | | |
| | | PROTEIN RAB-26 | | | |
| 107 | 100345233 | Novel Protein sim. GBank | Contains protein domain | oncogene | 1022, 1030, 1033, |
| | (847, 848) | gi\|4506517\|ref\|NP_002914.1\|pRGS2 - regulator of G- | (PF00615) - Regulator of G | | 1040 |
| | | protein signalling 2, 24kD | protein signaling domain | | |
| 108 | 87934124 | Novel Protein sim. GBank gi\|4007990\|gb\|AAC95339\| - | | oncogene | 1022 |
| | (2083, 2084) | (AF084363) DOK protein [Mus musculus] | | | |
| 109 | 87928836 | Novel Protein sim. GBank | Contains protein domain | oxidase | 1022 |
| | (733, 734) | gi\|4502983\|ref\|NP_001853.1\|pCOX5 - cytochrome c | (PF01215) - Cytochrome | | |
| | | oxidase subunit Vb | c oxidase subunit Vb | | |
| 110 | 87939746 | ovel Protein sim. GBank gi\|2133968\|pir\|\|I51346 - | | oxidase | 1022 |
| | (365, 366) | monoamine oxidase - rainbow trout | | | |
| 111 | 87937569 | Novel Protein sim. GBank gi\|509815 (U01971) - MtrA | Contains protein domain | phosphatase | 1022 |
| | (209, 210) | [Mycobacterium tuberculosis] | (PF00486) - Transcriptional | | |
| | | | regulatory protein, C | | |
| | | | terminal | | |
| 112 | 100394730 | Novel Protein sim. GBank gi\|3800995 (AF100670) - | Contains protein domain | phosphatase | 1000, 1006, 1014, |
| | (1025, 1026) | contains similarity to Oryctolagus cuniculus sarcolemmal | (PF00498) - Forkhead- | | 1022, 1024, 1026, |
| | | associated protein-3 (GB:U21157 [Caenorhabditis elegans] | associated (FHA) domain | | 1040, 1041 |
| 113 | 101723135 | Novel Protein sim. GBank gi\|119110\|sp\|P03211\|EBN1_{—} | | phosphatase | 1012, 1022, 1025, |
| | (1157, 1158) | EBV - EBNA-1 NUCLEAR PROTEIN | | | 1042 |
| 114 | 487940901 | Novel Protein sim. GBank | | polymerase | 1022 |
| | (617, 618) | gi\|118808\|sp\|P06710\|DP3X_ECOLI - DNA | | | |
| | | POLYMERASE III SUBUNITS GAMMA AND TAU | | | |
| 115 | 87916570 | Novel Protein sim. GBank | | polymerase | 1022 |
| | (1957, 1958) | gi\|1709579\|sp\|P51003\|PAP_HUMAN - POLY(A) | | | |
| | | POLYMERASE (PAP) (POLYNUCLEOTIDE | | | |
| | | ADENYLYLTRANSFERASE) | | | |
| 116 | 87938113 | Novel Protein sim. GBank gi\|790348 (U24494) - DNA | | polymerase | 1022 |
| | (217, 218) | polymerase [Mycobacterium smegmatis] | | | |
| 117 | 87938133 | Novel Protein sim. GBank | | protease | 1022 |
| | (223, 224) | gi\|3913995\|sp\|P77810\|LON_AZOBR - ATP-DEPENDENT | | | |
| | | PROTEASE LA | | | |
| 118 | 87942127 | Novel Protein sim. GBank gi\|5002553\|gb\|AAD37457.1\| - | | protease | 1022 |
| | (643, 644) | (AF074603) NonF [Streptomyces griseus subsp. griseus] | | | |
| 119 | 87941679 | Novel Protein sim. GBank gi\|538930\|pir\|\|B46665 - probable | | protease | 1022 |
| | (99, 100) | processing proteinase - Bacillus subtilis (fragment) | | | |
| 120 | 87942856 | Novel Protein sim. GBank | | reductase | 1022 |
| | (45, 46) | gi\|3287759\|sp\|Q10680\|COBK_MYCTU - | | | |
| | | PRECORRIN-6X REDUCTASE | | | |
| 121 | 87934683 | Novel Protein sim. GBank gi\|4154324 (AF107888) - | | reductase | 1022 |
| | (145, 146) | cytochrome b [Streptomyces lividans] | | | |
| 122 | 87934600 | Novel Protein sim. GBank gi\|1806187\|emb\|CAB06443\| - | Contains protein domain | ribosomalprot | 1022 |
| | (141, 142) | (Z84395) rplF [Mycobacterium tuberculosis] | (PF00347) - Ribosomal | | |
| | | | protein L6 | | |
| 123 | 87941068 | Novel Protein sim. GBank gi\|4512419\|dbj\|BAA75286.1\| - | Contains protein domain | ribosomalprot | 1022 |
| | (461, 462) | (AB017508) rplF homologue (identity of 78% to B. subtilis) | (PF00347) - Ribosomal | | |
| | | | [Bacillus halodurans] | protein L6 | |
| 124 | 87942913 | Novel Protein sim. GBank gi\|4539113\|emb\|CAB39834.1\| - | | ribosomalprot | 1022 |
| | (53, 54) | (AL049491) putative 30S ribosomal protein S4 | | | |
| | | [Mycobacterium leprae] | | | |
| 125 | 87942450 | Novel Protein sim. GBank gi\|396326 (U00006) - DNA- | | rnapolymerase | 1022 |
| | (115, 116) | directed RNA polymerase, beta-subunit [Escherichia coli] | | | |
| 126 | 87917009 | Novel Protein sim. GBank gi\|3046729\|emb\|CAA68069\| - | Contains protein domain | struct | 1022 |
| | (1823, 1824) | (X99736) dystrophin-like protein [Branchiostoma | (PF00569) - Zinc finger | | |
| | | lanceolatum] | present in dystrophin, | | |
| | | | CBP/p300 | | |
| 127 | 87917011 | Novel Protein sim. GBank gi\|3046767\|emb\|CAA68071\| - | Contains protein domain | struct | 1022 |
| | (1825, 1826) | (X99738) dystrophin-like protein [Pectinidae] | (PF00569) - Zinc finger | | |
| | | | present in dystrophin, | | |
| | | | CBP/300 | | |
| 128 | 87938485 | Novel Protein sim. GBank | | struct | 1022 |
| | (293, 294) | gi\|135700\|sp\|P19675\|TGT_ECOLI - QUEUINE TRNA- | | | |
| | | RIBOSYLTRANSFERASE (TRNA-GUANINE | | | |
| | | TRANSGLYCOSYLASE) (GUANINE INSERTION | | | |
| | | ENZYME) | | | |
| 129 | 100395388 | Novel Protein sim. GBank gi\|2246532 (U93872) - ORF 73, | | struct | 1014, 1022, 1030, |
| | (2027, 2028) | contains large complex repeat CR73 [Kaposi's sarcoma- | | | 1037, 1038, 1042 |
| | | associated herpesvirus] | | | |
| 130 | 100403278 | Novel Protein sim. GBank gi\|2462851 (AF016252) - | | struct | 1022, 1040 |
| | (1339, 1340) | Spinophilin [Rattus norvegicus] | | | |
| 131 | 87940910 | Novel Protein sim. GBank gi\|2634068\|emb\|CAB135691\| - | | struct | 1022 |
| | (619, 620) | (Z99112) similar to hypothetical proteins [Bacillus subtilis] | | | |
| 132 | 87916957 | Novel Protein sim. GBank gi\|3875400\|emb\|CAA981201\| - | | struct | 1022 |
| | (1079, 1080) | (Z73906) cDNA EST EMBL:M88866 comes from this gene | | | |
| | | [Caenorhabditis elegans] | | | |
| 133 | 100416852 | Novel Protein sim. GBank gi\|5420387\|emb\|CAB46679.1\| - | | struct | 1000, 1006, 1007, |
| | (1055, 1056) | (AJ243459) proteophosphoglycan [Leishmania major] | | | 1010, 1011, 1012, |
| | | | | | 1022, 1024, 1033, |
| | | | | | 1040 |
| 134 | 100339102 | | | struct | 1013, 1022, 1026, |
| | (877, 878) | | | | 1042 |
| 135 | 87937190 | | | struct | 1022 |
| | (1289, 1290) | | | | |
| 136 | 87942159 | Novel Protein sim. GBank | Contains protein domain | synthase | 1022 |
| | (647, 648) | gi\|1172783\|sp\|P41008\|PYRB_BACCL - ASPARTATE | (PF00185) - Aspartate/ | | |
| | | CARBAMOYLTRANSFERASE (ASPARTATE | ornithine | | |
| | | TRANSCARBAMYLASE) (ATCASE | carbamoyltransferase | | |
| 137 | 87940017 | Novel Protein sim. GBank | Contains protein domain | synthase | 1022 |
| | (395, 396) | gi\|136616\|sp\|P13954\|TYSY_STAAU - THYMIDYLATE | (PF00303) - Thymidylate | | |
| | | SYNTHASE (TS) | synthase | | |
| 138 | 87937691 | Novel Protein sim. GBank gi\|290577 (L10328) - glutamine | Contains protein domain | synthase | 1022 |
| | (265, 266) | amidotransferase [Escherichia coli] | (PF00310) - Glutamine | | |
| | | | amidotransferases class-II | | |
| 139 | 100401507 | Novel Protein sim. GBank gi\|1019951 (U37429) - similar to | Contains protein domain | synthase | 1000, 1004, 1010, |
| | (1233, 1234) | M. musculus MER5 and other AHPC/TSA proteins | (PF00534) - Glycosyl | | 1012, 1014, 1022 |
| | | [Caenorhabditis elegans] | transferases group 1 | | 1024, 1025, 1026, |
| | | | | | 1033, 1037, 1040, |
| | | | | | 1041, 1042 |
| 140 | 87936132 | Novel Protein sim. GBank gi\|3510629 (AF047828) - | Contains protein domain | synthase | 1022 |
| | (149, 150) | syringomycin synthetase [Pseudomonas syringae pv. | (PF00550) - | | |
| | | syringae] | Phosphopantetheine | | |
| | | | attachment site | | |
| 141 | 100359741 | Novel Protein sim. GBank gi\|4107276\|emb\|CAA67130\| - | Contains protein domain | synthase | 1022, 1025, 1030, |
| | (1763, 1764) | (X98506) acetyl-CoA synthetase [Solanum tuberosum] | (PF00711) - Beta defensins | | 1040 |
| 142 | 87937732 | Novel Protein sim. GBank | Contains protein domain | synthase | 1022 |
| | (271, 272) | gi\|3122879\|sp\|O07438\|SYA_MYCTU - ALANYL-TRNA | (PF11411) - tRNA | | |
| | | SYNTHETASE (ALANINE--TRNA LIGASE) (ALARS) | synthetases class II (A) | | |
| 143 | 87914166 | Novel Protein sim. GBank | | synthase | 1022 |
| | (325, 326) | gi\|115012\|sp\|P22822\|BIOW_BACSH-6- | | | |
| | | CARBOXYHEXANOATE--COA LIGASE (PIMELOYL- | | | |
| | | COA SYNTHASE) | | | |
| 144 | 87942175 | Novel Protein sim. GBank | | synthase | 1022 |
| | (649, 650) | gi\|1168574\|sp\|P42464\|ATPB_CORGL - ATP SYNTHASE | | | |
| | | BETA CHAIN | | | |
| 145 | 87937696 | Novel Protein sim. GBank gi\|1552590\|emb\|CAB02420\| - | | synthase | 1022 |
| | (267, 268) | (Z80233) fadD34 [Mycobacterium tuberculosis] | | | |
| 146 | 87917117 | Novel Protein sim. GBank gi\|1763267 (U73176) - CMP- | | synthase | 1022 |
| | (1959, 1960) | NeuAc:GM3 sialyltransferase [Gallus gallus] | | | |
| 147 | 87939184 | Novel Protein sim. GBank gi\|1839005\|emb\|CAB06647\| - | | synthase | 1022 |
| | (313, 314) | (Z85982) argJ [Mycobacterium tuberculosis] | | | |
| 148 | 87940189 | Novel Protein sim. GBank gi\|2104413\|emb\|CAB08713\| - | | synthase | 1022 |
| | (445, 446) | (Z95390) otsA [Mycobacterium tuberculosis] | | | |
| 149 | 87934127 | Novel Protein sim. GBank gi\|2114010\|emb\|CAB08959\| - | | synthase | 1022 |
| | (593, 594) | (Z95558) menB [Mycobacterium tuberculosis] | | | |
| 150 | 87942372 | Novel Protein sim. GBank | | synthase | 1022 |
| | (659, 660) | gi\|2492785\|sp\|P94907\|LEU1_MICAB-2- | | | |
| | | ISOPROPYLMALATE SYNTHASE (ALPHA- | | | |
| | | ISOPROPYLMALATE SYNTHASE) (ALPHA-IPM | | | |
| | | SYNTHETASE) | | | |
| 151 | 87943003 | Novel Protein sim. GBank | | synthase | 1022 |
| | (661, 662) | gi\|2506362\|sp\|P15042\|DNLJ_ECOLI - DNA LIGASE | | | |
| | | (POLYDEOXYRIBONUCLEOTIDE SYNTHASE | | | |
| | | (NAD+)) | | | |
| 152 | 87934795 | Novel Protein sim. GBank gi\|2746079 (AF015310)- BTH1 | | synthase | 1022 |
| | (9, 10) | [Brassica napus] | | | |
| 153 | 100400461 | Novel Protein sim. GBank gi\|4063700 (AF099053) - | | synthase | 1022, 1030, 1040, |
| | (1145, 1146) | phosphatidylserine synthase-2 [Mus musculus] | | | 1042 |
| 154 | 100401412 | Novel Protein sim. GBank gi\|4105095 (AF043225)-6- | | synthase | 1013, 1022, 1024, |
| | 931, 932) | pyruvoyl-tetrahydropterin synthase [Mus musculus] | | | 1033, 1040, 1042 |
| 155 | 100359450 | Novel Protein sim. GBank gi\|4426837\|gb\|AAD20564\| - | | synthase | 1022, 1024, 1042 |
| | (1629, 1630) | (AF108420) 1-aminocyclopropane-carboxilate synthase | | | |
| | | [Fugu rubripes] | | | |
| 156 | 87933148 | Novel Protein sim. GBank gi\|4530241\|gb\|AAD21957.1\| - | | synthase | 1022 |
| | (501, 502) | (AF101234) D-alamine-D-alanyl carrier protein ligase DltA | | | |
| | | [Staphylococcus aureus] | | | |
| 157 | 87933523 | Novel Protein sim. GBank | | synthase | 1022 |
| | (2079, 2080) | gi\|728831\|sp\|P39188\|ALU1_HUMAN - !!!! ALU | | | |
| | | SUBFAMILY J WARNING ENTRY !!!! | | | |
| 158 | 100340523 | Novel Protein sim. GBank gi\|3057036 (U92030) - TAK1 | | tgf | 1010, 1013, 1022, |
| | (761, 762) | [Xenopus laevis] | | | 1024, 1026, 1030, |
| | | | | | 1039, 1040, 1041, |
| | | | | | 1042 |
| 159 | 87930481 | Novel Protein sim. GBank | | tm7 | 1022 |
| | (385, 386) | gi\|3219838\|sp\|Q60890\|OL11_MOUSE - OLFACTORY | | | |
| | | RECEPTOR 11 (M49) | | | |
| 160 | 100340360 | Novel Protein sim. GBank | Contains protein domain | transcriptfactor | 1014, 1022, 1030, |
| | (759, 760) | gi\|141622\|sp\|P15620\|ZF35_MOUSE - ZINC FINGER | (PF00096) - Zinc finger, | | 1040, 1042 |
| | | PROTEIN ZFP-35 | C2H2 type | | |
| 161 | 100395224 | Novel Protein sim. GBank gi\|2887427\|dbj\|BAA24856\| - | Contains protein domain | transcriptfactor | 1022, 1030, 1037, |
| | (2025, 2026) | (AB007886) KIAA0426 [Homo sapiens] | (PF00096) - Zinc finger, | | 1042 |
| | | | C2H2 type | | |
| 162 | 100393696 | Novel Protein sim. GBank | Contains protein domain | transcriptfactor | 1000, 1022, 1024, |
| | (1919, 1920) | gi\|4507991\|ref\|NP_003431.1\|PZNF1 - zinc finger protein | (PF01352) - KRAB box | 1030, 1042 | |
| | | 140 (clone pHZ-39) | | | |
| 163 | 87916438 | Novel Protein sim. GBank gi\|2052147\|emb\|CAB08137\| - | Contains protein domain | transferase | 1022 |
| | (475, 476) | (Z94752) ksgA [Mycobacterium tuberculosis] | (PF00398) - Ribosomal | | |
| | | | RNA adenine dimethylases | | |
| 164 | 87939106 | Novel Protein sim. GBank | Contains protein domain | transferase | 1022 |
| | (307, 308) | gi\|135908\|sp\|P29277\|TKT_RHOSH - TRANSKETOLASE | (PF00456) - Transketolase | | |
| | | (TK) | | | |
| 165 | 87928658 | Novel Protein sim. GBank gi\|5459402\|emb\|CAB50760.1\| - | Contains protein domain | transferase | 1022 |
| | (155, 156) | (AL096839) probable transketolase [Streptomyces | (PF00456) - Transketolase | | |
| | | coelicolor] | | | |
| 166 | 87934976 | Novel Protein sim. GBank gi\|2121220 (U73819) - | | transferase | 1022 |
| | (981, 982) | polypeptide GalNAc transferase-T4 [Mus musculus] | | | |
| 167 | 87934676 | Novel Protein sim. GBank gi\|2791517\|emb\|CAA16054\| - | Contains protein domain | transport | 1022 |
| | (143, 144) | (AL021246) hypothetical protein Rv2477c [Mycobacterium | (PF00005) - ABC | | |
| | | tuberculosis] | transporter | | |
| 168 | 87942272 | Novel Protein sim. GBank | Contains protein domain | transport | 1022 |
| | (655, 656) | gi\|4633808\|gb\|AAD26860.1\|AF12779 - (AF127795) copper | (PF00122) - E1-E2 ATPase | | |
| | | transporter ActP [Rhizobium leguminosarum bv. viciae] | | | |
| 169 | 100400832 | Novel Protein sim. GBank gi\|3880929\|emb\|CAA16333.1\| - | Contains protein domain | transport | 1022, 1037, 1040 |
| | (1221, 1222) | (AL021481) similar to WD domain, G-beta repeat (2 | (PF00400) - WD domain, | | |
| | | domains); cDNA EST yk258d4.3 comes from this gene; | G-beta repeat | | |
| | | cDNA EST yk338d5.3 comes from this gene; cDNA EST | | | |
| | | yk338d5.5 comes from this gene; cDNA EST yk258d4.5 | | | |
| | | comes from this gene [C . . . | | | |
| 170 | 87941427 | Novel Protein sim. GBank | | transport | 1022 |
| | (629, 630) | gi\|1730693\|sp\|P53750\|YN93_YEAST - HYPOTHETICAL | | | |
| | | 32.8 KD PROTEIN IN BIO3-HXT17 INTERGENIC | | | |
| | | REGION | | | |
| 171 | 87939686 | Novel Protein sim. GBank gi\|1750127 (U66480) - YncC | | transport | 1022 |
| | (359, 360) | [Bacillus subtilis] | | | |
| 172 | 87936250 | Novel Protein sim. GBank gi\|2116756\|dbj\|BAA20107\| - | | transport | 1022 |
| | (27, 28) | (D86418) YfmR [Bacillus subtilis] | | | |
| 173 | 87941373 | Novel Protein sim. GBank gi\|2225958\|emb\|CAB10058\| - | | transport | 1022 |
| | (559, 560) | (Z97193 nanT [Mycobacterium tuberculosis] | | | |
| 174 | 87936400 | Novel Protein sim. GBank | | tranSport | 1022 |
| | (171, 172) | gi\|2492533\|sp\|Q46065\|AROP_CORGL - AROMATIC | | | |
| | | AMINO ACID TRANSPORT PROTEIN AROP | | | |
| | | (GENERAL AROMATIC AMINO ACID PERMEASE) | | | |
| 175 | 87940325 | Novel Protein sim. GBank | | transport | 1022 |
| | (451, 452) | gi\|2506111\|sp\|P38053\|YCBE_ECOLI - HYPOTHETICAL | | | |
| | | ABC TRANSPORTER ATP-BINDING PROTEIN IN | | | |
| | | PEPN-PYRD INTERGENIC REGION | | | |
| 176 | 87942869 | Novel Protein sim. GBank gi\|2791407\|emb\|CAA16001\| - | | transport | 1022 |
| | (47, 48) | (AL021184) hypothetical protein Rv1473 [Mycobacterium | | | |
| | | tuberculosis] | | | |
| 177 | 87939070 | Novel Protein sim. GBank gi\|2791517\|emb\|CAA16054\| - | | transport | 1022 |
| | (247, 248) | (AL021246) hypothetical protein Rv2477c [Mycobacterium | | | |
| | | tuberculosis] | | | |
| 178 | 87934955 | Novel Protein sim. GBank gi\|3874031\|emb\|CAA94203\| - | | transport | 1022 |
| | (13, 14) | (Z70265) Similarity to C. elegans p-glycoprotein | | | |
| | | (SW:MDR1_CAEEL); cDNA EST EMBL:D68381 comes | | | |
| | | from this gene; cDNA EST yk195b6.5 comes from this | | | |
| | | gene [Caenorhabditis elegans] | | | |
| 179 | 100341980 | Novel Protein sim. GBank | | transport | 1013, 1022, 1040, |
| | (1869, 1870) | gi\|4580997\|gb\|AAD24571.1\|AF12108 - (AF121081) cAMP | | | 1041, 1042 |
| | | inducible 2 protein [Mus musculus] | | | |
| 180 | 87930062 | Novel Protein sim. GBank | | transport | 1022 |
| | (331, 332) | gi\|465556\|sp\|P34698\|YCY1_SACER - HYPOTHETICAL | | | |
| | | PROTEIN IN CYP107B1 3′ REGION | | | |
| 181 | 87916696 | Novel Protein sim. GBank gi\|5123534\|emb\|CAB45290.1\| - | | transport | 1022 |
| | (573, 574) | (AL079332) putative ABC transporter ATP-binding subunit | | | |
| | | [Streptomyces coelicolor] | | | |
| 182 | 100342676 | | | transport | 1022, 1030, 1041, |
| | (1871, 1872) | | | | 1042 |
| 183 | 87935493 | Novel Protein sim. GBank gi\|4007773\|emb\|CAA22354\| - | | ubiquitin | 1022 |
| | (17, 18) | (AL034433) ubiquitin-activating enzyme el | | | |
| | | [Schizosaccharomyces pombe] | | | |
| 184 | 87916813 | Novel Protein sim. GBank | | ubiquitin | 1022 |
| | (2061, 2062) | gi\|5058999\|gb\|AAD38869.1\|AF05714 - (AF057146) | | | |
| | | putative deubiguitinating enzyme UBPY [Mus musculus] | | | |
| 185 | 87915888 | Novel Protein sim. GBank | Contains protein domain | UNCLASSIFIED | 1022 |
| | (833, 834) | gi\|4835860\|gb\|AAD30273.1\|AF12993 - (AF129933) RRM- | (PF00076) - RNA recog- | | |
| | | type RNA-binding protein hermes [Gallus gallus] | nition motif. (a.k.a. RRM, | | |
| | | | RBD, or RNP domain) | | |
| 186 | 87936117 | ovel Protein sim. GBank gi\|1208889 (U50135) - coded for | Contains protein domain | UNCLASSIFIED | 1022 |
| | (1173, 1174) | by C. elegans cDNA yk130e12.5; contains C2H2-type zinc | (PF00096) - Zinc finger, | | |
| | | fingers [Caenorhabditis elegans] | C2H2 type | | |
| 187 | 87942725 | | Contains protein domain | UNCLASSIFIED | 1022 |
| | (701, 702) | | (PF00169) - PH domain | | |
| 188 | 87914890 | | Contains protein domain | UNCLASSIFIED | 1022 |
| | (823, 824) | | (PF00169) - PH domain | | |
| 189 | 87940479 | Novel Protein sim. GBank | Contains protein domain | UNCLASSIFIED | 1022 |
| | (523, 524) | gi\|123760\|sp\|P21213\|HUTH_RAT - HISTIDINE | (PF00221) - Phenylalanine | | |
| | | AMMONIA-LYASE (HISTIDASE) | and histidine ammonia- | | |
| | | | lyases | | |
| 190 | 87938317 | Novel Protein sim. GBank gi\|3411184 (AF076240) - | Contains protein domain | UNCLASSIFIED | 1022 |
| | (241, 242) | putative Rieske-like ferredoxin MocE [Rhizobium | (PF00355) - Rieske | | |
| | | leguminosarum bv. viciae] | [2Fe-2S] domain | | |
| 191 | 87915979 | Novel Protein sim. GBank gi\|480009\|pir\|\|S36113-LIS-1 | Contains protein domain | UNCLASSIFIED | 1022 |
| | (2053, 2054) | protein - human | (PF00400) - WD domain, | | |
| | | | G-beta repeat | | |
| 192 | 100402959 | Novel Protein sim. GBank gi\|91208\|pir\|\|A28996 - proline- | Contains protein domain | UNCLASSIFIED | 1010, 1011, 1014, |
| | (1409, 1410) | rich protein M14 precursor - mouse | (PF00400) - WD domain, | 1022, 1024, 1025, | |
| | | | G-beta repeat | | 1026, 1030, 1033, |
| | | | | | 1035, 1040, 1041, |
| | | | | | 1042 |
| 193 | 87933099 | Novel Protein sim. GBank gi\|1550653\|emb\|CAB02387\| - | Contains protein domain | UNCLASSIFIED | 1022 |
| | (435, 436) | (Z80226) hypothetical protein Rv0775 [Mycobacterium | (PF00440) - Bacterial | | |
| | | tuberculosis] | regulatory proteins, tetR | | |
| | | | family | | |
| 194 | 87941101 | Novel Protein sim. GBank gi\|2909580\|emb\|CAA17309\| - | Contains protein domain | UNCLASSIFIED | 1022 |
| | (549, 550) | (AL021926) hypothetical protein Rv0115 [Mycobacterium | (PF00444) - Ribosomal | | |
| | | tuberculosis] | protein L36 | | |
| 195 | 87921680 | | Contains protein domain | UNCLASSIFIED | 1022 |
| | (785, 786) | | (PF00446) - Gonadotropin- | | |
| | | | releasing hormones | | |
| 196 | 87935199 | | Contains protein domain | UNCLASSIFIED | 1022 |
| | (91, 92) | | (PF00455) - Bacterial | | |
| | | | regulatory proteins, deoR | | |
| | | | family | | |
| 197 | 100355499 | Novel Protein sim. GBank gi\|3880627\|emb\|CAB07860\| - | Contains protein domain | UNCLASSIFIED | 1022, 1024, 1042 |
| | (1195, 1196) | (Z93785) similar to Protein phosphatase 2C (2 domains); | (PF00481) - Protein | | |
| | | cDNA EST yk279g8.5 comes from this gene | phosphatase 2C | | |
| | | [Caenorhabditis elegans] | | | |
| 198 | 100417218 | | Contains protein domain | UNCLASSIFIED | 1022, 1040 |
| | (855, 856) | | (PF00582) - Universal | | |
| | | | stress protein family | | |
| 199 | 87941615 | Novel Protein sim. GBank | Contains protein domain | UNCLASSIFIED | 1022 |
| | (2091, 2092) | gi\|1709655\|sp\|P30427\|PLEC_RAT - PLECTIN | (PF00681) - Plectin repeat | | |
| 200 | 87939126 | Novel Protein sim. GBank gi\|2109271 (U97042) - CeoB | Contains protein domain | UNCLASSIFIED | 1022 |
| | (311, 312) | [Burkholderia cepacia] | (PF00873) - AcrB/AcrD/ | | |
| | | | AcrF family | | |
| 201 | 100392152 | Novel Protein sim. GBank gi\|3041847 (AC004542) - | Contains protein domain | UNCLASSIFIED | 1000, 1007, 1021, |
| | (1539, 1540) | OXYSTEROL-BINDING PROTEIN-like; similar to | (PF01237) - Oxysterol- | | 1022, 1026, 1030, |
| | | P22059 (PID:g129308) [Homo sapiens] | | | 1040, 1042 |
| 202 | 87938418 | Novel Protein sim. GBank gi\|3258244\|dbj\|BAA30927.1\| - | Contains protein domain | UNCLASSIFIED | 1022 |
| | (287, 288) | (AP000007) 380aa long hypothetical protein [Pyrococcus | (PF01381) - Helix-turn- | | |
| | | horikoshii] | helix | | |
| 203 | 100359583 | Novel Protein sim. GBank gi\|3877951\|emb\|CAB04515\| - | Contains protein domain | UNCLASSIFIED | 1022 |
| | (1639, 1640) | (Z81555) predicted using Genefinder [Caenorhabditis | (PF01428) - AN1-like Zinc | | |
| | | elegans] | finger | | |
| 204 | 100344020 | | Contains protein domain | UNCLASSIFIED | 1022, 1037, 1040 |
| | (1885, 1886) | | (PF01436) - NHL repeat | | |
| 205 | 100391691 | Novel Protein sim. GBank | Contains protein domain | UNCLASSIFIED | 1014, 1022, 1024, |
| | (1663, 1664) | gi\|4929647\|gb\|AAD34084.1\|AF15184 - (AF151847) | (PF01529) - DHHC zinc | | 1033 |
| | | CGI-89 protein [Homo sapiens] | finger domain | | |
| 206 | 100349180 | Novel Protein sim. GBank gi\|3879893\|emb\|CAA16511\| - | Contains protein domain | UNCLASSIFIED | 1000, 1002, 1006, |
| | (1299, 1300) | (AL021571) predicted using Genefinder [Caenorhabditis | (PF01581) - FMRFamide | | 1010, 1011, 1012, |
| | | elegans] | related peptide family | | 1014, 1015, 1022, |
| | | | | | 1024, 1025, 1026, |
| | | | | | 1030, 1033, 1037, |
| | | | | | 1040, 1041, 1042 |
| 207 | 100339544 | Novel Protein sim. GBank gi\|1644450 (U67864) - MEX-3 | Contains protein domain | UNCLASSIFIED | 1000, 1006, 1022, |
| | (1187, 1188) | [Caenorhabditis elegans] | (PF00013) - KH domain | 1024, 1026, 1030, | |
| | | | | | 1042 |
| 208 | 100340244 | | Contains protein domain | UNCLASSIFIED | 1011, 1013, 1020, |
| | (1485, 1486) | | (PF00039) - Fibronectin | | 1022, 1040, 1041, |
| | | | type I domain | | 1042 |
| 209 | 100417321 | Novel Protein sim. GBank gi\|1363912\|pir\|\|JC4296 - ring | Contains protein domain | UNCLASSIFIED | 1010, 1011, 1013, |
| | (2041, 2042) | finger protein - fruit fly (Drosophila melanogaster) | (PF00097) - Zinc finger, | | 1022, 1024, 1026, |
| | | | C3HC4 type (RING finger) | | 1030, 1033, 1040, |
| | | | | | 1042 |
| 210 | 87941596 | Novel Protein sim. GBank gi\|5458584\|emb\|CAB50072.1\| - | Contains protein domain | UNCLASSIFIED | 1022 |
| | (637, 638) | (AJ248286) PAB0773 [Pyrococcus abyssi] | (PF00132) - Bacterial | | |
| | | | transferase hexapeptide | | |
| | | | (four repeats) | | |
| 211 | 87939098 | Novel Protein sim. GBank | Contains protein domain | UNCLASSIFIED | 1022 |
| | (249, 250) | gi\|3122419\|sp\|O06594\|NADC_MYCTU - NICOTINATE- | (PF00326) - Prolyl | | |
| | | NUCLEOTIDE PYROPHOSPHORYLASE | oligopeptidase family | | |
| | | (CARBOXYLATING) (QUlNOLINATE | | | |
| | | PHOSPHORIBOSYLTRANSFERASE | | | |
| | | (DECARBOXYLATING)) (QAPRTASE) | | | |
| 212 | 87941397 | Novel Protein sim. GBank gi\|4587326\|dbj\|BAA76717.1\| - | Contains protein domain | UNCLASSIFIED | 1022 |
| | (561, 562) | (AB025424) aconitase [Corynebacterium glutamicum] | (PF00330) - Aconitase | | |
| | | | family (aconitate hydratase) | | |
| 213 | 87942031 | Novel Protein sim. GBank gi\|2634079\|emb\|CAB13580\| - | Contains protein domain | UNCLASSIFIED | 1022 |
| | (567, 568) | (Z99112) transcriptional regulator [Bacillus subtilis] | (PF00440) - Bacterial | | |
| | | | regulatory proteins, tetR | | |
| | | | family | | |
| 214 | 87939634 | Novel Protein sim. GBank gi\|3261746\|emb\|CAB08449\|- | Contains protein domain | UNCLASSIFIED | 1022 |
| | (353, 354) | (Z95207) nusA [Mycobacterium tuberculosis] | (PF00575) - S1 RNA | | |
| | | | binding domain | | |
| 215 | 100359768 | Novel Protein sim. GBank gi\|2104288\|emb\|CAB08619\| - | Contains protein domain | UNCLASSIFIED | 1006, 1010, 1012, |
| | (1765, 1766) | (Z95387) hypothetical protein Rv2623 [Mycobacterium | (PF00651) - BTB/POZ | 1013, 1014, 1022, | |
| | | tuberculosis] | domain | 1023, 1024, 1026, | |
| | | | | | 1030, 1031, 1033, |
| | | | | | 1040, 1041, 1042 |
| 216 | 100340247 | Novel Protein sim. GBank gi\|3880625\|emb\|CAB07858\|]- | Contains protein domain | UNCLASSIFIED | 1000, 1013, 1022, |
| | (1487, 1488) | (Z93785) predicted using Genefinder; similar to RNA | (PF01412) - Putative | | 1026, 1030 |
| | | recognition motif. (aka RRM, RBD, or RNP domain); | GTP-ase activating protein | | |
| | | cDNA EST EMBL:T01682 comes from this gene; cDNA | for Arf | | |
| | | EST EMBL:M75823 comes from this gene; cDNA EST | | | |
| | | EMBL:D27559 comes from this ge . . . | | | |
| 217 | 87939058 | Novel Protein sim. GBank gi\|1001236\|dbj\|BAA10477\| - | | UNCLASSIFIED | 1022 |
| | (245, 246) | (D64003) hypothetical protein [Synechocystis sp.] | | | |
| 218 | 100393002 | Novel Protein sim. GBank gi\|103623\|pir\|\|A32249 - | | UNCLASSIFIED | 1022, 1042 |
| | (1671, 1672) | collagen - sea urchin (Paracentrotus lividus) (fragment) | | | |
| 219 | 87931859 | Novel Protein sim. GBank gi\|1061334 (U34258) - | | UNCLASSIFIED | 1022 |
| | (491, 492) | cappuccino [Drosophila melanogaster] | | | |
| 220 | 100343658 | Novel Protein sim. GBank gi\|106322\|pir\|\|B34087 - | | UNCLASSIFIED | 1022, 1026 |
| | (1999, 2000) | hypothetical protein (L1H 3′ region) - human | | | |
| 221 | 87939798 | Novel Protein sim. GBank gi\|1074775\|pir\|\|G64029 - | | UNCLASSIFIED | 1022 |
| | (369, 370) | hypothetical protein H11426 - Haemophilus influenzae | | | |
| | | (strain Rd KW20) | | | |
| 222 | 100392824 | Novel Protein sim. GBank | | UNCLASSIFIED | 1006, 1009, 1011, |
| | (1905, 1906) | gi\|113161\|sp\|P28614\|ACOR_ALCEU - ACETOIN | | | 1013, 1014, 1022, |
| | | CATABOLISM REGULATORY PROTEIN | | | 1024, 1026, 1028, |
| | | | | | 1030, 1033, 1034, |
| | | | | | 1040, 1041, 1042 |
| 223 | 87934267 | Novel Protein sim. GBank | | UNCLASSIFIED | 1022 |
| | (601, 602) | gi\|1170130\|sp\|P42238\|GUDH_BACSU - PROBABLE | | | |
| | | GLUCARATE DEHYDRATASE (GDH) | | | |
| 224 | 101736722 | Novel Protein sim. GBank | | UNCLASSIFIED | 1022, 1026, 1030, |
| | (1807, 1808) | gi\|1174415\|sp\|P46804\|SPD2_NEPCL - SPIDROIN 2 | | | 1033, 1040, 1041, |
| | | (DRAGLINE SILK FIBROIN 2) | | | 1042 |
| 225 | 101315991 | Novel Protein sim. GBank | | UNCLASSIFIED | 1022 |
| | (1153, 1154) | gi\|1175951\|sp\|P43557\|YFE6_YEAST - HYPOTHETICAL | | | |
| | | 24.0 KD PROTEIN IN EMP47-SEC53 INTERGENIC | | | |
| | | REGION | | | |
| 226 | 87942829 | Novel Protein sim. GBank | | UNCLASSIFIED | 1022 |
| | (41, 42) | gi\|1176021\|sp\|P43616\|YFL4_YEAST - HYPOTHETICAL | | | |
| | | 52.9 KD PROTEIN IN SAP155-YMR31 INTERGENIC | | | |
| | | REGION | | | |
| 227 | 100402427 | Novel Protein sim. GBank gi\|119110\|sp\|P03211\|EBN1_{—} | | UNCLASSIFIED | 1010, 1011, 1012, |
| | (1319, 1320) | EBV - EBNA-1 NUCLEAR PROTEIN | | | 1014, 1022, 1024, |
| | | | | | 1025, 1030, 1040, |
| | | | | | 1041, 1042 |
| 228 | 87921162 | Novel Protein sim. GBank gi\|1196425 (M12140) -envelope | | UNCLASSIFIED | 1022 |
| | (749, 750) | protein [Homo sapiens] | | | |
| 229 | 87940597 | Novel Protein sim. GBank gi\|1228047\|dbj\|BAA12111\| - | | UNCLASSIFIED | 1022 |
| | (841, 842) | (D83782) the KIAA0199 gene is expressed ubiquitously.; | | | |
| | | the KIAA0199 protein shows similarity to sea urchin | | | |
| | | hydroxymethylglutalyl-CoA reductase, and retains 8 | | | |
| | | hydrophobic domains. [Homo sapiens] | | | |
| 230 | 87928435 | Novel Protein sim. GBank | | UNCLASSIFIED | 1022 |
| | (1279, 1280) | gi\|126296\|sp\|P08548\|LIN1_NYCCO - LINE-1 REVERSE | | | |
| | | TRANSCRIPTASE HOMOLOG | | | |
| 231 | 87916049 | Novel Protein sim. GBank | | UNCLASSIFIED | 1022 |
| | (377, 378) | gi\|127232\|sp\|P12281\|MOEA_ECOLI - | | | |
| | | MOLYBDOPTERIN BIOSYNTHESIS MOEA PROTEIN | | | |
| 232 | 100403061 | Novel Protein sim. GBank gi\|1293561 (U49187) - Diff40 | | UNCLASSIFIED | 1006, 1014, 1017, |
| | (1263, 1264) | gene product [Homo sapiens] | | | 1022, 1024, 1030, |
| | | | | | 1040, 1042 |
| 233 | 100391781 | Novel Protein sim. GBank | | UNCLASSIFIED | 1022, 1024, 1030, |
| | (1769, 1770) | gi\|134920\|sp\|P21997\|SSGP_VOLCA - SULFATED | | | 1042 |
| | | SURFACE GLYCOPROTEIN 185 (SSG 185) | | | |
| 234 | 100392153 | Novel Protein sim. GBank gi\|1399831 (U59235) - unknown | | UNCLASSIFIED | 1022, 1025, 1040, |
| | (1541, 1542) | [Synechococcus PCC7942] | | | 1042 |
| 235 | 87939342 | Novel Protein sim. GBank gi\|144233 (M69228) - putative | | UNCLASSIFIED | 1022 |
| | (319, 320) | [Caulobacter crescentus] | | | |
| 236 | 87930431 | Novel Protein sim. GBank gi\|1458285 (U64842) - F25B4.2 | | UNCLASSIFIED | 1022 |
| | (1719, 1720) | gene product [Caenorhabditis elegans] | | | |
| 237 | 87942119 | Novel Protein sim. GBank gi\|1460074\|emb\|CAB01049\| - | | UNCLASSIFIED | 1022 |
| | (641, 642) | (Z77250) hypothetical protein Rv2566 [Mycobacterium | | | |
| | | tuberculosis] | | | |
| 238 | 100339107 | Novel Protein sim. GBank gi\|1648881\|emb\|CAB03670\| - | | UNCLASSIFIED | 1011, 1022, 1039, |
| | (881, 882) | (Z81331) infB [Mycobacterium tuberculosis] | | | 1042 |
| 239 | 87938703 | Novel Protein sim. GBank gi\|1648921\|emb\|CAB03646\| - | | UNCLASSIFIED | 1022 |
| | (337, 338) | (Z81331) hypothetical protein Rv2800 [Mycobacterium | | | |
| | | tuberculosis] | | | |
| 240 | 87935836 | Novel Protein sim. GBank | | UNCLASSIFIED | 1022 |
| | (159, 160) | gi\|1706364\|sp\|Q11138\|DEOC_MYCTU - | | | |
| | | DEOXYRIBOSE-PHOSPHATE ALDOLASE | | | |
| | | (PHOSPHODEOXYRIBOALDOLASE) | | | |
| | | (DEOXYRIBOALDOLASE) | | | |
| 241 | 100344300 | Novel Protein sim. GBank gi\|1710282 (U79298) - unknown | | UNCLASSIFIED | 1001, 1006, 1010, |
| | (2001, 2002) | [Home sapiens] | | | 1011, 1013, 1014, |
| | | | | | 1017, 1022, 1030, |
| | | | | | 1033, 1040, 1041, |
| | | | | | 1042 |
| 242 | 87940201 | Novel Protein sim. GBank | | UNCLASSIFIED | 1022 |
| | (447, 448) | gi\|1711359\|sp\|P52966\|SECA_RHOCA - PREPROTEIN | | | |
| | | TRANSLOCASE SECA SUBUNIT | | | |
| 243 | 100341064 | Novel Protein sim. GBank | | UNCLASSIFIED | 1022, 1030, 1040, |
| | (1507, 1508) | gi\|1711658\|sp\|P54797\|T10_MOUSE - SER/TUR-RICH | | | 1041, 1042 |
| | | PROTEIN T10 IN DGCR REGION | | | |
| 244 | 87930768 | Novel Protein sim. GBank | | UNCLASSIFIED | 1022 |
| | (425, 426) | gi\|1723092\|sp\|Q11059\|Y08N_MYCTU - | | | |
| | | HYPOTHETICAL 37.0 KD PROTEIN CY50.23C | | | |
| 245 | 87918539 | Novel Protein sim. GBank gi\|1794165\|dbj\|BAA11215\| - | | UNCLASSIFIED | 1022 |
| | (71, 72) | (D78137) Na+/glucose symporter [Vibrio | | | |
| | | parahaemolyticus] | | | |
| 246 | 87940070 | Novel Protein sim. GBank gi\|1817693\|emb\|CAB06567\| - | | UNCLASSIFIED | 1022 |
| | (401, 402) | (Z84724) xthA [Mycobacterium tuberculosis] | | | |
| 247 | 87937703 | Novel Protein sim. GBank gi\|1870011\|emb\|CAB06862\| - | | UNCLASSIFIED | 1022 |
| | (269, 270) | (Z92539) prsA [Mycobacterium tuberculosis] | | | |
| 248 | 87942496 | Novel Protein sim. GBank gi\|2062680 (U88964) - HEM45 | | UNCLASSIFIED | 1022 |
| | (1121, 1122) | [Homo sapiens] | | | |
| 249 | 100401052 | Novel Protein sim. GBank gi\|2072961 (U93568) - putative | | UNCLASSIFIED | 1013, 1022 |
| | (703, 704) | p150 [Homo sapiens] | | | |
| 250 | 100341728 | Novel Protein sim. GBank gi\|2072967 (U93570) - putative | | UNCLASSIFIED | 1022, 1042 |
| | (1743, 1744) | 150 [Homo sapiens] | | | |
| 251 | 87938297 | Novel Protein sim. GBank gi\|2078010\|emb\|CAB08457\| - | | UNCLASSIFIED | 1022 |
| | (239, 240) | (Z95207) cobA [Mycobacterium tuberculosis] | | | |
| 252 | 87941351 | Novel Protein sim. GBank gi\|2145853\|pir\|\|S72938 - hflX | | UNCLASSIFIED | 1022 |
| | (555, 556) | protein - Mycobacterium leprae | | | |
| 253 | 87934730 | Novel Protein sim. GBank gi\|2226004 (U49973) - ORF1; | | UNCLASSIFIED | 1022 |
| | (5, 6) | MER37; putative transposase similar to pogo element | | | |
| | | [Homo sapiens] | | | |
| 254 | 100399281 | Novel Protein sim. GBank gi\|2244707\|dbj\|BAA21115.1\| - | | UNCLASSIFIED | 1022, 1042 |
| | (1305, 1306) | (AB005287) thrombospondin 1 [Bos taurus] | | | |
| 255 | 100342127 | Novel Protein sim. GBank gi\|2244987\|emb\|CAB10408.1\| - | | UNCLASSIFIED | 1022, 1040 |
| | (1627, 1628) | (Z97340) hypothetical protein [Arabidopsis thaliana] | | | |
| 256 | 100390781 | Novel Protein sim. GBank gi\|2370595\|emb\|CAA04749\| - | | UNCLASSIFIED | 1010, 1022, 1030 |
| | (1533, 1534) | (AJ001414) GTPase activating protein [Yarrowia lipolytica] | | | |
| 257 | 101708935 | Novel Protein sim. GBank | | UNCLASSIFIED | 1000, 1010, 1011, |
| | (1419, 1420) | gi\|2493240\|sp\|O10341\|Y091_NPVOP - HYPOTHETICAL | | | 1014, 1022, 1024, |
| | | 29.3 KD PROTEIN (0RF92) | | | 1026, 1030, 1033, |
| | | | | | 1042 |
| 258 | 87939711 | Novel Protein sim. GBank | | UNCLASSIFIED | 1022 |
| | (361, 362) | gi\|2493967\|sp\|Q03529\|YM81_YEAST - HYPOTHETICAL | | | |
| | | 44.9 KD PROTEIN IN URA10-NRC1 INTERGENIC | | | |
| | | REGION | | | |
| 259 | 87942111 | Novel Protein sim. GBank | | UNCLASSIFIED | 1022 |
| | (639, 640) | gi\|2495602\|sp\|P76113\|YNCB_ECOLI - PUTATIVE | | | |
| | | NADP-DEPENDENT OXIDOREDUCTASE IN TEHB- | | | |
| | | RHSE INTERGENIC REGION | | | |
| 260 | 100339959 | Novel Protein sim. GBank | | UNCLASSIFIED | 1000, 1001, 1006, |
| | (1367, 1368) | gi\|2496887\|sp\|Q09232\|YQ22_CAEEL - HYPOTHETICAL | | | 1014, 1022, 1024, |
| | | 32.0 KD PROTEIN C09F5.2 IN CHROMOSOME III | | | 1030, 1040, 1041, |
| | | | | | 1042 |
| 261 | 101334126 | Novel Protein sim. GBank | | UNCLASSIFIED | 1022, 1033 |
| | (943, 944) | gi\|2498402\|sp\|Q62839\|GM13_RAT - CIS-GOLGI | | | |
| | | MATRIX PROTEIN GM130 | | | |
| 262 | 87934798 | Novel Protein sim. GBank | | UNCLASSIFIED | 1022 |
| | (11,12) | gi\|2501069\|sp\|Q46127\|SYW_CLOLO - | | | |
| | | TRYPTOPHANYL-TRNA SYNTHETASE | | | |
| | | (TRYPTOPHAN--TRNA LIGASE) (TRPRS) | | | |
| 263 | 87936542 | Novel Protein sim. GBank | | UNCLASSIFIED | 1022 |
| | (179, 180) | gi\|2506630\|sp\|P22525\|YCBB_ECOLI - HYPOTHETICAL | | | |
| | | 67.8 KD PROTEIN IN MUKB-ASPC INTERGENIC | | | |
| | | REGION | | | |
| 264 | 87915115 | Novel Protein sim. GBank gi\|2529686 (AC002535) - | | UNCLASSIFIED | 1022 |
| | (373, 374) | putative G-beta-repeat containing protein, 5′ partial | | | |
| | | [Arabidopsis thaliana] | | | |
| 265 | 87941667 | Novel Protein sim. GBank gi\|2576287\|emb\|CAA75362\| - | | UNCLASSIFIED | 1022 |
| | (97, 98) | (Y15086) HepC protein [Cylindrotheca fusiformis] | | | |
| 266 | 87934406 | Novel Protein sim. GBank gi\|2622301 (AE000887) - | | UNCLASSIFIED | 1022 |
| | (85, 86) | transcriptional regulator [Methanobacterium | | | |
| | | thermoautotrophicum] | | | |
| 267 | 100392784 | Novel Protein sim. GBank gi\|2623757 (U72994) - neurabin | | UNCLASSIFIED | 1022, 1030 |
| | (1897, 1898) | [Rattus norvegicus] | | | |
| 268 | 87935988 | Novel Protein sim. GBank gi\|2632434\|emb\|CAB11943\| - | | UNCLASSIFIED | 1022 |
| | (167, 168) | (Z99104) similar to beta-lactamase [Bacillus subtilis] | | | |
| 269 | 87942027 | Novel Protein sim. GBank gi\|2661641\|emb\|CAA15748\| - | | UNCLASSIFIED | 1022 |
| | (565, 566) | (AL009198) hypothetical protein Rv3363c [Mycobacterium | | | |
| | | tuberculosis] | | | |
| 270 | 87940436 | Novel Protein sim. GBank gi\|2661696\|emb\|CAA15800\| - | | UNCLASSIFIED | 1022 |
| | (517, 518) | (AL009204) hypothetical protein SC9B10.10 [Streptomyces | | | |
| | | coelicolor] | | | |
| 271 | 100337799 | Novel Protein sim. GBank gi\|2662165\|dbj\|BAA23714\|0 - | | UNCLASSIFIED | 1022, 1030, 1040 |
| | (677, 678) | (AB007902) HH0712 cDNA clone for KIAA0442 has a | | | |
| | | 574-bp insertion at position 1474 of the sequence of | | | |
| | | KIAA0442. [Homo sapiens] | | | |
| 272 | 100394354 | Novel Protein sim. GBank gi\|284068\|pir\|\|S26650 - DNA- | | UNCLASSIFIED | 1000, 1022, 1030, |
| | (1921, 1922) | binding protein 5-human | | | 1041, 1042 |
| 273 | 87939678 | Novel Protein sim. GBank | | UNCLASSIFIED | 1022 |
| | (357, 358) | gi\|2851412\|sp\|Q10817\|YX27_MYCTU - | | | |
| | | HYPOTHETICAL 40.1 KD PROTEIN CY274.27C | | | |
| 274 | 87942974 | Novel Protein sim. GBank | | UNCLASSIFIED | 1022 |
| | (63, 64) | gi\|2851648\|sp\|P37645\|YHJG_ECOLI - HYPOTHETICAL | | | |
| | | 75.1 KD PROTEIN IN TREF-KDGK INTERGENIC | | | |
| | | REGION | | | |
| 275 | 87935499 | Novel Protein sim. GBank gi\|2865252 (AF007170) - | | UNCLASSIFIED | 1022 |
| | (699, 700) | unknown [Homo sapiens] | | | |
| 276 | 100388330 | Novel Protein sim. GBank gi\|2865252 (AF007170) - | | UNCLASSIFIED | 1022, 1024, 1026 |
| | (1023, 1024) | unknown [Homo sapiens] | | | |
| 277 | 87916810 | Novel Protein sim. GBank gi\|2896770\|emb\|CAA17247\| - | | UNCLASSIFIED | 1022 |
| | (575, 576) | (AL021899) hypothetical protein Rv2033c [Mycobacterium | | | |
| | | tuberculosis] | | | |
| 278 | 100397017 | Novel Protein sim. GBank gi\|2950243\|emb\|CAB10894\| - | | UNCLASSIFIED | 1019, 1022 |
| | (1037, 1038) | (Z98204) extensin [Hordeum vulgare] | | | |
| 279 | 100340394 | Novel Protein sim. GBank gi\|2952545 (AF051898) - | | UNCLASSIFIED | 1004, 1022, 1042 |
| | (1495, 1496) | coronin binding protein [Dictyostelium discoideum] | | | |
| 280 | 87934608 | Novel Protein sim. GBank gi\|2981631\|dbj\|BAA25253.1\| - | | UNCLASSIFIED | 1022 |
| | (1167, 1168) | (AB012223) ORF2 [Canis familiaris] | | | |
| 281 | 87938876 | Novel Protein sim. GBank gi\|2981631\|dbj\|BAA25253.1\| - | | UNCLASSIFIED | 1022 |
| | (1583, 1584) | (AB012223) ORF2 [Canis familiaris] | | | |
| 282 | 87930787 | Novel Protein sim. GBank gi\|2981631\|dbj\|BAA25253.1\| - | | UNCLASSIFIED | 1022 |
| | (1843, 1844) | (AB012223) ORF2 [Canis familiaris] | | | |
| 283 | 100343603 | Novel Protein sim. GBank gi\|2981631\|dbj\|BAA25253.1\| - | | UNCLASSIFIED | 1022, 1040 |
| | (1997, 1998) | (AB012223) ORF2 [Canis familiaris] | | | |
| 284 | 100359671 | Novel Protein sim. GBank gi\|2988400 (AC004381) - | | UNCLASSIFIED | 1022 |
| | (1645, 1646) | Unknown gene product [Homo sapiens] | | | |
| 285 | 87941339 | Novel Protein sim. GBank gi\|2995312\|emb\|CAA18340\| - | | UNCLASSIFIED | 1022 |
| | (553, 554) | (AL022268) hypothetical protein 5C4H2.25 Streptomyces | | | |
| | | coelicolor] | | | |
| 286 | 100401131 | Novel Protein sim. GBank gi\|2996650 (AC004493) - | | UNCLASSIFIED | 1022, 1040 |
| | (1147, 1148) | KIAA0324 [Homo sapiens] | | | |
| 287 | 87920446 | Novel Protein sim. GBank gi\|3043590\|dbj\|BAA25459\| - | | UNCLASSIFIED | 1022 |
| | (1433, 1434) | (AB011105) KIAA0533 protein [Homo sapiens] | | | |
| 288 | 87940158 | Novel Protein sim. GBank gi\|3063877\|emb\|CAA18562\| - | | UNCLASSIFIED | 1022 |
| | (441, 442) | (AL022486) putative integral membrane protein | | | |
| | | [Mycobacterium leprae] | | | |
| 289 | 87937642 | Novel Protein sim. GBank gi\|3088561 (AF059313)- myo- | | UNCLASSIFIED | 1022 |
| | (215, 216) | inositol dehyclrogenase [Sinorhizobium meliloti] | | | |
| 290 | 100402757 | Novel Protein sim. GBank gi\|3094014 (AF060862) - | | UNCLASSIFIED | 1022, 1024 |
| | (1397, 1398) | unknown [Homo sapiens] | | | |
| 291 | 100402087 | Novel Protein sim. GBank | | UNCLASSIFIED | 1008, 1022, 1028, |
| | (937, 938) | gi\|3123021\|sp\|Q90508\|VIT1_FUNHE - VITELLOGENIN I | | | 1040, 1042 |
| | | PRECURSOR (VTG I) (CONTAINS: LIPOVITELLIN 1 | | | |
| | | (LV1); PHOSVITIN (PV); LIPOVITELLIN 2 (LV2)) | | | |
| 292 | 87939308 | Novel Protein sim. GBank gi\|3169705 (AC004780) - | | UNCLASSIFIED | 1022 |
| | (1479, 1480) | F17127_1 [Home sapiens] | | | |
| 293 | 100393007 | Novel Protein sim. GBank gi\|322759\|pir\|\|PQ0479 - pistil | | UNCLASSIFIED | 1014, 1022, 1030, |
| | (1673, 1674) | extensin-like protein (clone pMG14) - common tobacco | | | 1037, 1042 |
| | | (fragment) | | | |
| 294 | 87936185 | Novel Protein sim. GBank gi\|3294243\|emb\|CAA19856\| - | | UNCLASSIFIED | 1022 |
| | (25, 26) | (AL031031) hypothetical protein SC7C7.10 [Streptomyces | | | |
| | | coelicolor] | | | |
| 295 | 87928201 | Novel Protein sim. GBank gi\|3319990\|emb\|CAA76720\| - | | UNCLASSIFIED | 1022 |
| | (963, 964) | (Y17267) ubiquitin-conjugating enzyme [Mus musculus] | | | |
| 296 | 87940495 | Novel Protein sim. GBank gi\|3328101 (AF073995) - beta- | | UNCLASSIFIED | 1022 |
| | (527, 528) | galactosidase [synthetic construct] | | | |
| 297 | 100359458 | Novel Protein sim. GBank gi\|3329465 (AF064553) - NSD1 | | UNCLASSIFIED | 1000, 1022, 1040, |
| | (1631, 1632) | protein [Mus musculus] | | | 1042 |
| 298 | 100345437 | Novel Protein sim. GBank gi\|3342234 (U93909) - nuclear | | UNCLASSIFIED | 1012, 1014, 1022 |
| | (1013, 1014) | antigen EBNA-1 [Cercopithecine herpesvirus 15] | | | |
| 299 | 100359727 | Novel Protein sim. GBank gi\|3342738 (AC005328) - | | UNCLASSIFIED | 1009, 1022, 1040, |
| | (1761, 1762) | R26660_1, partial CDS [Homo sapiens] | | | 1042 |
| 300 | 100399909 | Novel Protein sim. GBank gi\|3417296 (AC003007) - | | UNCLASSIFIED | 1022 |
| | (1547, 1548) | Unknown gene product (partial) [Homo sapiens] | | | |
| 301 | 100401080 | Novel Protein sim. GBank gi\|3523113 (AF026689) - | | UNCLASSIFIED | 1006, 1010, 1011, |
| | (1049, 1050) | prostate-specific transglutaminase [Homo sapiens] | | | 1022, 1025, 1030, |
| | | | | | 1041, 1042 |
| 302 | 87915848 | Novel Protein sim. GBank gi\|3659883\|gb\|AAC96298.1\| - | | UNCLASSIFIED | 1022 |
| | (1947, 1948) | (AF091624) Pelle associated protein Pellino [Drosophila | | | |
| | | melanogaster] | | | |
| 303 | 100401354 | Novel Protein sim. GBank gi\|3695141 (AF081157) - | | UNCLASSIFIED | 1022, 1024, 1042 |
| | (927, 928) | CL3BA [Rattus norvegicus] | | | |
| 304 | 87940919 | Novel Protein sim. GBank gi\|3820538 (AF080002) - | | UNCLASSIFIED | 1022 |
| | (621, 622) | cobyric acid synthase CobQ [Heliobacillus mobilis] | | | |
| 305 | 87938607 | Novel Protein sim. GBank gi\|3820582 (AF086791) - | | UNCLASSIFIED | 1022 |
| | (301, 302) unknown [Zymomonas mobilis] | | | | |
| 306 | 87924036 | Novel Protein sim. GBank gi\|3868778\|dbj\|BAA34216\| - | | UNCLASSIFIED | 1022 |
| | (1717, 1718) | (AB005549) atypical PKC specific binding protein [Rattus | | | |
| | | norvegicus] | | | |
| 307 | 100402140 | Novel Protein sim. GBank gi\|3874149\|emb\|CAA97423.1\| - | | UNCLASSIFIED | 1000, 1006, 1010, |
| | (941, 942) | (Z73103) predicted using Genefinder [Caenorhabditis | | | 1013, 1014, 1022, |
| | elegans] | | | 1025, 1031, 1042 | |
| 308 | 100359633 | Novel Protein sim. GBank gi\|3874528\|emb\|CAA92729\| - | | UNCLASSIFIED | 1013, 1014, 1022, |
| | (1641, 1642) | (Z68335) predicted using Genefinder; similar to collagen; | | | 1026, 1030, 1041, |
| | cDNA EST EMBL:D68967 comes from this gene; cDNA | | | 1042 | |
| | | EST EMBL:D69298 comes from this gene; cDNA EST | | | |
| | | EMBL:D69331 comes from this gene; cDNA EST | | | |
| | | EMBL:D70368 comes from this gen . . . | | | |
| 309 | 87939637 | Novel Protein sim. GBank gi\|3877175\|emb\|CAA90338.1\| - | | UNCLASSIFIED | 1022 |
| | (1601, 1602) | (Z50028) cDNA EST yk321h8.5 comes from this gene; | | | |
| | | cDNA EST EMBL:D68896 comes from this gene; cDNA | | | |
| | | EST yk395f9.5 comes from this gene Caenorhabditis | | | |
| | | | elegans] | | |
| 310 | 87933004 | Novel Protein sim. GBank gi\|3877645\|emb\|CAB05741\| - | | UNCLASSIFIED | 1022 |
| | (831, 832) | (Z83230) cDNA EST yk355g3.5 comes from this gene | | | |
| | | [Caenorhabditis elegans] | | | |
| 311 | 87941022 | Novel Protein sim. GBank gi\|3882271\|dbj\|BAA34495.1\| - | | UNCLASSIFIED | 1022 |
| | (1867, 1868) | (AB018318) KIAA0775 protein [Homo sapiens] | | | |
| 312 | 87938401 | Novel Protein sim. GBank | | UNCLASSIFIED | 1022 |
| | (285, 286) gi\|3913155\|sp\|Q59140\|BGAL_ARTSP - BETA- | | | | |
| | | GALACTOSIDASE (LACTASE) | | | |
| 313 | 87937647 | Novel Protein sim. GBank | | UNCLASSIFIED | 1022 |
| | (261, 262) | gi\|3915659\|sp\|Q10671\|COBL_MYCTU - PRECORRIN-6Y | | | |
| | | C5,15-METHYLTRANSFERASE | | | |
| | | [DECARBOXYLATING] (PRECORRIN-6 | | | |
| | | METHYLTRANSFERASE) (PRECORRIN-6Y | | | |
| | | METHYLASE) | | | |
| 314 | 87936854 | Novel Protein sim. GBank gi\|3924708\|emb\|CAA84646\| - | | UNCLASSIFIED | 1022 |
| | (197, 198) | (Z35597) Weak similarity with sea squirt nidogen precursor | | | |
| | | protein (blastp score 71); cDNA EST EMBL:T02069 comes | | | |
| | | from this gene; cDNA EST EMBL:D76135 comes from this | | | |
| | | gene; cDNA EST EMBL:D73147 comes from this gene; | | | |
| | | cDNA EST EMB . . . | | | |
| 315 | 87942035 | Novel Protein sim. GBank gi\|4007726\|emb\|CAA22410\| - | | UNCLASSIFIED | 1022 |
| | (569, 570) | (AL034447) putative methylase [Streptomyces coelicolor] | | | |
| 316 | 100387811 | Novel Protein sim. GBank gi\|4056479 (AC005896) - | | UNCLASSIFIED | 1006, 1022, 1024, |
| | (893, 894) | unknown protein [Arabidopsis thaliana] | | | 1030, 1040 |
| 317 | 87940393 | Novel Protein sim. GBank gi\|4206757 (AF102514)- E-2/E- | | UNCLASSIFIED | 1022 |
| | (457, 458) | 2′ protein [Kiebsiella oxytoca] | | | |
| 318 | 100394858 | Novel Protein sim. GBank gi\|4240231\|dbj\|BAA74894.1\|0 - | | UNCLASSIFIED | 1022, 1042 |
| | (1029, 1030) | (AB020678) KIAA0871 protein [Homo sapiens] | | | |
| 319 | 100401586 | Novel Protein sim. GBank gi\|4240317\|dbj\|BAA74937.1\| - | | UNCLASSIFIED | 1022, 1024, 1042 |
| | (1239, 1240) | (AB020721) KIAA0914 protein [Homo sapiens] | | | |
| 320 | 100348009 | Novel Protein sim. GBank gi\|4505323\|ref\|NP_003932.1\| | | UNCLASSIFIED | 1022, 1040 |
| | (891, 892) | pN-WA - UNKNOWN | | | |
| 321 | 100397232 | Novel Protein sim. GBank gi\|4512103\|gb\|AAD21616.1\| - | | UNCLASSIFIED | 1014, 1022 |
| | (901, 902) | (AF117897) rab11 binding protein [Bos taurus] | | | |
| 322 | 87934390 | Novel Protein sim. GBank gi\|451544 (U04267) - proline- | | UNCLASSIFIED | 1022 |
| | (1101, 1102) | rich cell wall protein [Gossypium barbadense] | | | |
| 323 | 100341791 | Novel Protein sim. GBank gi\|1451544 (U04267) - proline- | | UNCLASSIFIED | 1022, 1037, 1039 |
| | (1747, 1748) | rich cell wall protein [Gossypium barbadense] | | | |
| 324 | 87936560 | Novel Protein sim. GBank gi\|4539105\|emb\|CAB39826.1\| - | | UNCLASSIFIED | 1022 |
| | (181, 182) | (AL049491) putative ATP-binding protein [Mycobacterium | | | |
| | | leprae] | | | |
| 325 | 100338018 | Novel Protein sim. GBank | | UNCLASSIFIED | 1010, 1011, 1012, |
| | (1007, 1008) | gi\|4580997\|gb\|AAD24571.1\|AF12108 - (AF121081) cAMP | | | 1013, 1014, 1022, |
| | | inducible 2 protein [Mus musculus] | | | 1033, 1040, 1041, |
| | | | | | 1042 |
| 326 | 87934203 | Novel Protein sim. GBank gi\|4587293\|dbj\|BAA76704.1\| - | | UNCLASSIFIED | 1022 |
| | (597, 598) | (AB023411) RecN [Deinococcus radiodurans] | | | |
| 327 | 87931571 | Novel Protein sim. GBank gi\|4650844\|dbj\|BAA77027.1\| - | | UNCLASSIFIED | 1022 |
| | (827, 828) | (AB026190) Ketch motif containing protein [Homo sapiens] | | | |
| 328 | 100416874 | Novel Protein sim. GBank | | UNCLASSIFIED | 1016, 1022 |
| | (1057, 1058) | gi\|465445\|sp\|P33485\|VNUA_PRVKA - PROBABLE | | | |
| | | NUCLEAR ANTIGEN | | | |
| 329 | 100397520 | Novel Protein sim. GBank | | UNCLASSIFIED | 1000, 1003, 1006, |
| | (1199, 1200) | gi\|466097\|sp\|P34624\|YOJ1_CAEEL - HYPOTHETICAL | | | 1007, 1011, 1013, |
| | | 63.5 KD PROTEIN ZK353.1 IN CHROMOSOME III | | | 1014, 1021, 1022, |
| | | | | | 1024, 1026, 1030, |
| | | | | | 1039, 1040, 1042 |
| 330 | 87928884 | Novel Protein sim. GBank | | UNCLASSIFIED | 1022 |
| | (735, 736) | gi\|4758694\|ref\|NP_004819.1\|pLY95 - lymphocyte antigen | | | |
| | | 95 (mouse) homolog (activating NK-receptor; NK-p44) | | | |
| 331 | 100392320 | Novel Protein sim. GBank gi\|4803852\|emb\|CAB42656.1\| - | | UNCLASSIFIED | 1022 |
| | (799, 800) | (AJ238974) amphipaxl protein [Branchiostoma | | | |
| | | lanceolatum] | | | |
| 332 | 101726728 | Novel Protein sim. GBank gi\|4808166\|emb\|CAB42797.1\| - | | UNCLASSIFIED | 1000, 1022 |
| | (777, 778) | (Y18879) largest subunit of the RNA polymerase II complex | | | |
| | | [Drosophila pseudoobscura] | | | |
| 333 | 87942488 | Novel Protein sim. GBank gi\|4808343\|emb\|CAB42757.1\| - | | UNCLASSIFIED | 1022 |
| | (125, 126) | (AL049841) cell division protein ftsH homolog | | | |
| | | [Streptomyces coelicolor] | | | |
| 334 | 100417011 | Novel Protein sim. GBank gi\|4826433\|emb\|CAB42889.1\| - | | UNCLASSIFIED | 1004, 1010, 1014, |
| | (1927, 1928) | (AL031447) dJ126A5.2.1 (novel protein) (isoform 1) | | | 1022, 1024, 1026, |
| | | [Homo sapiens] | | | 1030, 1033, 1040, |
| | | | | | 1041, 1042 |
| 335 | 100390361 | Novel Protein sim. GBank | | UNCLASSIFIED | 1000, 1010, 1011, |
| | (1385, 1386) | gi\|4827065\|ref\|NP_005073.1\|pZNF1 - zinc finger protein | | | 1013, 1014, 1022, |
| | | 147 (estrogen-responsive finger protein) | | | 1024, 1025, 1030, |
| | | | | | 1033, 1040, 1041, |
| | | | | | 1042 |
| 336 | 100342830 | Novel Protein sim. GBank gi\|4884202\|emb\|CAB43222.1\| - | | UNCLASSIFIED | 1006, 1022, 1030, |
| | (1877, 1878) | (AL049953) hypothetical protein [Homo sapiens] | | | 1040, 1042 |
| 337 | 100392446 | Novel Protein sim. GBank gi\|4972740\|gb\|AAD34765.1\| - | | UNCLASSIFIED | 1006, 1012, 1013, |
| | (1669, 1670) | (AF132177) unknown [Drosophila melanogaster] | | | 1014, 1022, 1023, |
| | | | | | 1024, 1025, 1026, |
| | | | | | 1030, 1033, 1040, |
| | | | | | 1041, 1042 |
| 338 | 87916976 | Novel Protein sim. GBank gi\|4972746\|gb\|AAD34768.1\| - | | UNCLASSIFIED | 1022 |
| | (1081, 1082) | (AF132180) unknown [Drosophila melanogaster] | | | |
| 339 | 87936391 | Novel Protein sim .GBank | | UNCLASSIFIED | 1022 |
| | (29, 30) | gi\|4980933\|gb\|AAD35512.1\|AE00172 - (AE001721) | | | |
| | | oxidoreductase, putative [Thermotoga maritima] | | | |
| 340 | 87935656 | Novel Protein sim. GBank | | UNCLASSIFIED | 1022 |
| | (21, 22) | gi\|4982405\|gb\|AAD36886.1\|AE00181 - (AE001819) ftsH | | | |
| | | protease activity modulator HflC [Thermotoga maritima] | | | |
| 341 | 101716725 | Novel Protein sim. GBank | | UNCLASSIFIED | 1000, 1006, 1007, |
| | (1421, 1422) | gi\|5001993\|gb\|AAD37247.1\|AF13432 - (AF134321) | | | 1009, 1012, 1013, |
| | | chimeric AFGP/trypsinogen-like serine protease precursor | | | 1014, 1022, 1030, |
| | | [Dissostichus mawsoni] | | | 1033, 1040, 1041, |
| | | | | | 1042 |
| 342 | 100401380 | Novel Protein sim. GBank | | UNCLASSIFIED | 1015, 1022, 1041, |
| | (929, 930) | gi\|5031709\|ref\|NP_005829.1\|pGAT\| - putative glycine-N- | | | 1042 |
| | | acyltransferase; aralkyl-CoA N-acyltransferase | | | |
| 343 | 100387658 | Novel Protein sim. GBank | | UNCLASSIFIED | 1022 |
| | (1017, 1018) | gi\|5031925\|ref\|NP_005798.1\|pMSF\| - megakaryocyte | | | |
| | | stimulating factor; MSF | | | |
| 344 | 87926353 | Novel Protein sim. GBank | | UNCLASSIFIED | 1022 |
| | (1091, 1092) | gi\|5091669\|gb\|AAD39617.1\|AF02616 - (AF026169) SALF | | | |
| | | [Homo sapiens] | | | |
| 345 | 87938638 | Novel Protein sim. GBank | | UNCLASSIFIED | 1022 |
| | (303, 304) | gi\|5354203\|gb\|AAD42412.1\|AF15749 - (AF157493) | | | |
| | | hypothetical protein [Zymomonas mobilis] | | | |
| 346 | 87938426 | Novel Protein sim. GBank gi\|5420387\|emb\|CAB46679.1\| - | | UNCLASSIFIED | 1022 |
| | (289, 290) | (AJ243459) proteophosphoglycan [Leishmania major] | | | |
| 347 | 101710577 | Novel Protein sim. GBank gi\|5420389\|emb\|CAB46680.1\| - | | UNCLASSIFIED | 1000, 1011, 1013, |
| | (1805, 1806) | (AJ243460) proteophosphoglycan [Leishmania major] | | | 1014, 1022, 1024, |
| | | | | | 1025, 1026, 1033, |
| | | | | | 1037, 1041, 1042 |
| 348 | 100399574 | Novel Protein sim. GBank gi\|549854 (U076 15) - mucin | | UNCLASSIFIED | 1004, 1010, 1013, |
| | (1391, 1392) | [Rattus norvegicus] | | | 1014, 1022, 1025, |
| | | | | | 1030, 1033, 1040, |
| | | | | | 1042 |
| 349 | 100397275 | Novel Protein sim. GBank | | UNCLASSIFIED | 1007, 1013, 1022, |
| | (905, 906) | gi\|5524667\|gb\|AAD44333.1\|AF15935 - (AF159356) | | | 1023, 1024, 1033, |
| | | Munc 13-4 protein [Rattus norvegicus] | | | 1037, 1040, 1041, |
| | | | | | 1042 |
| 350 | 87923511 | Novel Protein sim. GBank gi\|5531351\|emb\|CAB50983.1\| - | | UNCLASSIFIED | 1022 |
| | (421, 422) | (AL096852) hypothetical protein [Streptomyces coelicolor | | | |
| | | A3(2)] | | | |
| 351 | 87936139 | Novel Protein sim. GBank | | UNCLASSIFIED | 1022 |
| | (1175, 1176) | gi\|5630077\|gb\|AAD45822.1\|AC00601 - (AC006017) similar | | | |
| | | to ALR; similar to AAC51735 (PID:g2358287) [Homo | | | |
| | | sapiens] | | | |
| 352 | 87935120 | Novel Protein sim. GBank gi\|5689948\|emb\|CAB51985.1\| - | | UNCLASSIFIED | 1022 |
| | (87, 88) | (AL109663) putative isoleucyl-tRNA synthetase | | | |
| | | [Streptomyces coelicolor A3(2)] | | | |
| 353 | 87934253 | Novel Protein sim. GBank gi\|5689968\|emb\|CAB52005.1\| - | | UNCLASSIFIED | 1022 |
| | (599, 600) | (AL109663) putative membrane protein [Streptomyces | | | |
| | | coelicolor A3(2)] | | | |
| 354 | 87921196 | Novel Protein sim. GBank gi\|632082\|pir\|\|S43071 - | | UNCLASSIFIED | 1022 |
| | (1449, 1450) | hypothetical protein 5 - human herpesvirus 6 | | | |
| 355 | 87941483 | Novel Protein sim. GBank gi\|684940 (U20661) - unknown | | UNCLASSIFIED | 1022 |
| | (867, 868) | [Dictyostelium discoideum] | | | |
| 356 | 100390729 | Novel Protein sim. GBank | | UNCLASSIFIED | 1022, 1040 |
| | (775, 776) | gi\|728831\|sp\|P39188\|ALU1_HUMAN - !!!! ALU | | | |
| | | SUBFAMILY J WARNING ENTRY !!!! | | | |
| 357 | 87919697 | Novel Protein sim. GBank | | UNCLASSIFIED | 1022 |
| | (955, 956) | gi\|728831\|sp\|P39188\|ALU1_HUMAN - !!!! ALU | | | |
| | | SUBFAMILY J WARNING ENTRY !!!! | | | |
| 358 | 101739182 | Novel Protein sim. GBank | | UNCLASSIFIED | 1017, 1022 |
| | (1939, 1940) | gi\|728831\|sp\|P39188\|ALU1_HUMAN - !!!! ALU | | | |
| | | SUBFAMILY J WARNING ENTRY !!!! | | | |
| 359 | 87941561 | Novel Protein sim. GBank | | UNCLASSIFIED | 1022 |
| | (869, 870) | gi\|728837\|sp\|P39194\|ALU7_HUMAN - !!!! ALU | | | |
| | | SUBFAMILY SQ WARNING ENTRY !!!! | | | |
| 360 | 87931056 | Novel protein sim. GBank | | UNCLASSIFIED | 1022 |
| | (1575, 1576) | gi\|728867\|sp\|P40602\|APQ_ARATH - ANTER-SPECIFIC | | | |
| | | PROLINE-RICH PROTEIN APG PRECURSOR | | | |
| 361 | 100356826 | Novel Protein sim. GBank | | UNCLASSIFIED | 1022, 1024, 1042 |
| | (1375, 1376) | gi\|729094\|sp\|P39880\|CDP_HUMAN - CCAAT | | | |
| | | DISPLACEMENT PROTEIN (CDP) | | | |
| 362 | 87918470 | Novel Protein sim. GBank | | UNCLASSIFIED | 1022 |
| (69, 70) | gi\|732079\|sp\|P39356\|YJHU_ECOLI - HYPOTHETICAL | | | | |
| | | TRANSCRIPTIONAL REGULATOR IN FECI-FIMB | | | |
| | | INTERGENIC REGION | | | |
| 363 | 87941093 | Novel Protein sim. GBank | | UNCLASSIFIED | 1022 |
| | (467, 468) | gi\|732352\|sp\|P39605\|YWCG_BACSU - HYPOTHETICAL | | | |
| | | 28.3 KD PROTEIN IN QOXD-VPR INTERGENIC | | | |
| | | REGION | | | |
| 364 | 101721431 | Novel Protein sin. GBank gi\|81286\|pir\|\|S22697 - extensin - | | UNCLASSIFIED | 1007, 1011, 1013, |
| | (1071, 1072) | Volvox carteri (fragment) | | | 1022, 1024, 1030, |
| | | | | | 1033, 1039, 1042 |
| 365 | 100339511 | Novel Protein sim. GBank gi\|81286\|pir\|\|S22697 - extensin - | UNCLASSIFIED | 1000, 1007, 1012, | |
| | (1185, 1186) | Volvox carteri (fragment) | | | 1022, 1024, 1030, |
| | | | | | 1033, 1040, 1041, |
| | | | | | 1042 |
| 366 | 100391456 | Novel Protein sim. GBank gi\|81286\|pir\|\|S22697 - extensin - | UNCLASSIFIED | 1022, 1025, 1042 | |
| | (1535, 1536) | Volvox carteri (fragment) | | | |
| 367 | 100378656 | Novel Protein sim. GBank gi\|81286\|pir\|\|S22697 - extensin - | | UNCLASSIFIED | 1022 |
| | (2015, 2016) | Volvox carteri (fragment) | | | |
| 368 | 100342715 | Novel Protein sim. GBank gi\|91208\|pir\|\|A28996 - proline- | | UNCLASSIFIED | 1000, 1022, 1040, |
| | (1873, 1874) | rich protein M14 precursor - mouse | | | 1041, 1042 |
| 369 | 100400409 | Novel Protein sim. GBank gi\|987501 (U32626) - unknown | | UNCLASSIFIED | 1002, 1014, 1022, |
| | (1139, 1140) | [Drosophila melanogaster] | | | 1024, 1042 |
| 370 | 87938591 | Novel Protein sim. GBank gi\|1051283 (U38664) - aquaporin | Contains protein domain | water_channel | 1022 |
| | (297, 298) | Z [Escherichia coli] | (PF00230) - Major intrinsic | | |
| | | | protein | | |
| 371 | 87937935 | Novel Protein sim. GBank | Contains protein domain | water_channel | 1022 |
| | (281, 282) | gi\|4502187\|ref\|NP_001161.1\|pAQP7 - aquaporin 7 | (PF00230) - Major intrinsic | | |
| | | | protein | | |
| 372 | 87942809 | Novel Protein sim. GBank gi\|1001708\|dbj\|BAA10545\| - | | UNCLASSIFIED | 1022 |
| | (37, 38) | (D64004) NifS [Synechocystis sp.] | | | |
| 373 | 87935566 | Novel Protein sim. GBank gi\|106323\|pir\|\|A34087 - | | UNCLASSIFIED | 1022 |
| | (19, 20) | hypothetical protein (L1H 5′ region) - human | | | |
| 374 | 87938603 | Novel Protein sim. GBank gi\|1072867\|pir\|\|C55208 - socA3 | | UNCLASSIFIED | 1022 |
| | (299, 300) | protein - Myxococcus xanthus | | | |
| 375 | 87914131 | Novel Protein sim. GBank gi\|1079170\|pir\|\|S50125 - larval | | UNCLASSIFIED | 1022 |
| | (323, 324) | glue protein Lgp-3 precursor - fruit fly (Drosophila virilisl ) | | | |
| 376 | 100401505 | Novel Protein sim. GBank gi\|111811\|pir\|\|S16788 - probable | | UNCLASSIFIED | 1012, 1013, 1014, |
| | (1231, 1232) | reverse transcriptase - rat | | | 1022, 1024, 1030, |
| | | | | | 1040, 1041 |
| 377 | 100341233 | Novel Protein sim. GBank | | UNCLASSIFIED | 1011, 1022, 1040 |
| | (769, 770) | gi\|113667\|sp\|P23960\|ALUB_HUMAN - !!!! ALU CLASS B | | | |
| | | WARNING ENTRY !!!! | | | |
| 378 | 87943051 | Novel Protein sim. GBank | | UNCLASSIFIED | 1022 |
| | (673, 674) | gi\|1170927\|sp\|P45131\|MET2_HAEIN - PUTATIVE | | | |
| | | HOMOSERINE O-ACETYLTRANSFERASE | | | |
| | | (HOMOSERINE O-TRANS-ACETYLASE) | | | |
| 379 | 87932516 | Novel Protein sim. GBank | | UNCLASSIFIED | 1022 |
| | (493, 494) gi\|1176479\|sp\|P44520\|YJJP_HAEIN - HYPOTHETICAL | | | | |
| | | PROTEIN HI0108 | | | |
| 380 | 100392821 | Novel Protein sim. GBank gi\|19110\|sp\|P03211\|EBN1_ | | UNCLASSIFIED | 1011, 1022, 1024, |
| | (1903, 1904) | EBV - EBNA-1 NUCLEAR PROTEIN | | | 1030, 1032, 1040, |
| | | | | | 1042 |
| 381 | 87940491 | Novel Protein sim. GBank | | UNCLASSIFIED | 1022 |
| | (525, 526) | gi\|126725\|sp\|P21139\|MAN1_RAT - ALPHA- | | | |
| | | MANNOSIDASE (ALPHA-D-MANNOSIDE | | | |
| | | MANNOHYDROLASE) | | | |
| 382 | 100340205 | Novel Protein sim. GBank | | UNCLASSIFIED | 1022, 1025, 1026, |
| | (1481, 1482) | gi\|134920\|sp\|P21997\|SSGP_VOLCA - SULFATED | | | 1030, 1042 |
| | | SURFACE GLYCOPROTEIN 185 (SSG 185) | | | |
| 383 | 100417319 | Novel Protein sim. GBank gi\|1363912\|pir\|\|JC4296 - ring | | UNCLASSIFIED | 1022, 1040, 1042 |
| | (2039, 2040) | finger protein - fruit fly (Drosophila melanogaster) | | | |
| 384 | 101323811 | Novel Protein sim. GBank gi\|1402857 (U60593) - | | UNCLASSIFIED | 1022, 1037, 1040, |
| | (1069, 1070) | cytoplasmic protein Ndr1 [Mus musculus] | | | 1042 |
| 385 | 87942019 | Novel Protein sim. GBank gi\|1480332\|ebb\|CAB00898\|0 - | | UNCLASSIFIED | 1022 |
| | (563, 564) | (Z77137) hypothetical protein Rv1254 [Mycobacterium | | | |
| | | tuberculosis] | | | |
| 386 | 101321949 | Novel Protein sim. GBank gi\|1655699\|emb\|CAA69023\| - | | UNCLASSIFIED | 1022, 1033 |
| | (2049, 2050) | (Y07752) pherophorin-S [Volvox carteri] | | | |
| 387 | 87938991 | Novel Protein sim. GBank gi\|1707700\|emb\|CAA69504\| - | | UNCLASSIFIED | 1022 |
| | (345, 346) | (Y08256) glycogen operon protein GlgX [Sulfolobus | | | |
| | | solfataricus] | | | |
| 388 | 87919481 | Novel Protein sim. GBank | | UNCLASSIFIED | 1022 |
| | (947, 948) | gi\|1717793\|sp\|P53995\|TS24_MOUSE - PROTEIN TSG24 | | | |
| | | (MEIOTIC CHECK POINT REGULATOR) | | | |
| 389 | 100360209 | Novel Protein sim. GBank gi\|1938574 (U97190) - B0025.2 | | UNCLASSIFIED | 1011, 1012, 1013, |
| | (1891, 1892) | gene product [Caenorhabditis elegans] | | | 1014, 1022, 1024, |
| | | | | | 1025, 1028, 1030, |
| | | | | | 1033, 1037, 1039, |
| | | | | | 1040, 1042 |
| 390 | 100393052 | Novel Protein sim. GBank gi\|1947160 (AF000298) - weak | | UNCLASSIFIED | 1022, 1024, 1040 |
| | (1675, 1676) | similarity to collagens; glycine- and proline-rich | | | |
| | | [Caenorhabditis elegans] | | | |
| 391 | 87940065 | Novel Protein sim. GBank gi\|2065210\|emb\|CAA73251\|0 - | | UNCLASSIFIED | 1022 |
| | (399, 400) | (Y12713) Pro-Pol-dUTPase polyprotein [Mus musculus] | | | |
| 392 | 87917002 | Novel Protein sim. GBank gi\|2072699\|emb\|CAB08333\| - | | UNCLASSIFIED | 1022 |
| | (411, 412) | (Z95121) pvdS [Mycobacterium tuberculosis] | | | |
| 393 | 87940463 | Novel Protein sim. GBank gi\|2078483 (U43200) - antifreeze | | UNCLASSIFIED | 1022 |
| | (519, 520) | glycopeptide AFGP polyprotein precursor [Boreogadus | | | |
| | | saida] | | | |
| 394 | 100344205 | Novel Protein sim. GBank gi\|2114473 (U96963) - | | UNCLASSIFIED | 1004, 1022, 1023, |
| | (1889, 1890) | p140mDia [Mus musculus] | | | 1040 |
| 395 | 100393146 | Novel Protein sim. GBank gi\|2129478\|pir\|\|551939 - | | UNCLASSIFIED | 1022, 1033, 1040, |
| | (1679, 1680) | chitinase (EC 3.2.1.14) precursor - beet | | | 1042 |
| 396 | 101334754 | Novel Protein sim. GBank gi\|2144101\|pir\|\|155210 - | | UNCLASSIFIED | 1014, 1022 |
| | 1343, 1344) | tricarboxylate carrier - rat (fragment) | | | |
| 397 | 87940670 | Novel Protein sim. GBank gi\|2145684\|pir\|\|572805 - | | UNCLASSIFIED | 1022 |
| | (547, 548) | B1549_F2_87 protein - Mycobacterium leprae | | | |
| 398 | 100340738 | Novel Protein sim. GBank gi\|2213611 (AC000103) - | | UNCLASSIFIED | 1022 |
| | (1613, 1614) | F21J9.5 [Arabidopsis thaliana] | | | |
| 399 | 87931075 | Novel Protein sim. GBank gi\|2226004 (U49973) - ORF1; | | UNCLASSIFIED | 1022 |
| | (1577, 1578) | MER37; putative transposase similar to pogo element | | | |
| | | Homo sapiens] | | | |
| 400 | 87938856 | Novel Protein sim. GBank gi\|2226005 (U49973) - ORF2: | | UNCLASSIFIED | 1022 |
| | (1581, 1582) function unknown [Homo sapiens] | | | | |
| 401 | 87942813 | Novel Protein sim. GBank gi\|229050\|prf\|\|1817175B - nhaR | | UNCLASSIFIED | 1022 |
| | (39, 40) | gene [Salmonella enteritidis] | | | |
| 402 | 87932519 | Novel Protein sim. GBank | | UNCLASSIFIED | 1022 |
| | (1975, 1976) | gi\|2493240\|sp\|O10341\|Y091_NPVOP - HYPOTHETICAL | | | |
| | | 29.3 KD PROTEIN (ORF92) | | | |
| 403 | 87940534 | Novel Protein sim. GBank | | UNCLASSIFIED | 1022 |
| | (529, 530) | gi\|2494533\|sp\|P75939\|FLGG_ECOLI - FLAGELLAR | | | |
| | | BASAL-BODY ROD PROTEIN FLGG (DISTAL ROD | | | |
| | | PROTEIN) | | | |
| 404 | 87935991 | Novel Protein sim. GBank | | UNCLASSIFIED | 1022 |
| | (169, 170) | gi\|2495102\|sp\|Q58683\|YC87_METJA - HYPOTHETICAL | | | |
| | | PROTEIN MJ1287 | | | |
| 405 | 87934970 | Novel Protein sim. GBank | | UNCLASSIFIED | 1022 |
| | (15, 16) | gi\|2495565\|sp\|P77213\|YBDK_ECOLI - HYPOTHETICAL | | | |
| | | 41.7 KD PROTEIN IN NFNB-ENTD INTERGENIC | | | |
| | | REGION | | | |
| 406 | 87942969 | Novel Protein sim. GBank | | UNCLASSIFIED | 1022 |
| | (61, 62) | gi\|2496669\|sp\|P55511\|Y4JK_RHISN - PUTATIVE | | | |
| | | PLASMID STABILITY PROTEIN Y4JK | | | |
| 407 | 87940566 | Novel Protein sim. GBank | | UNCLASSIFIED | 1022 |
| | (533, 534) | gi\|2498414\|sp\|Q48481\|GLF8_KLEPN - PROBABLE UDP- | | | |
| | | GALACTOPYRANOSE MUTASE | | | |
| 408 | 87933270 | Novel Protein sim. GBank | | UNCLASSIFIED | 1022 |
| | (505, 506) | gi\|2500204\|sp\|Q59263\|RIBF_CORAM - RIBOFLAVIN | | | |
| | | KINASE (FLAVOKINASE)/FMN | | | |
| | | ADENYLYLTRANSFERASE (FAD | | | |
| | | PYROPHOSPHORYLASE) (FAD SYNTHETASE) | | | |
| 409 | 87942430 | Novel Protein sim. GBank | | UNCLASSIFIED | 1022 |
| | (109, 110) | gi\|2501069\|sp\|Q46127\|SYW_CLOLO - TRYPTOPHANYL- | | | |
| | | TRNA SYNTHETASE (TRYPTOPHAN--TRNA LIGASE) | | | |
| | | (TRPRS) | | | |
| 410 | 100393271 | Novel Protein sim. GBank gi\|2828280\|emb\|CAA16694.1\| - | | UNCLASSIFIED | 1022 |
| | (817, 818) | (AL021687) putative protein [Arabidopsis thaliana] | | | |
| 411 | 100393277 | Novel Protein sim. GBank gi\|2828280\|emb\|CAA16694.1\| - | | UNCLASSIFIED | 1022, 1040, 1041, |
| | (819, 820) | (AL021687) putative protein [Arabidopsis thaliana] | | | 1042 |
| 412 | 100417068 | Novel Protein sim. GBank gi\|2828710 (AF043642) - matrin | | UNCLASSIFIED | 1000, 1014, 1022, |
| | (1933, 1934) | cyclophilin [Rattus norvegicus] | | | 1042 |
| 413 | 87938521 | Novel Protein sim. GBank gi\|2829867 (AC002396) - | | UNCLASSIFIED | 1022 |
| | (1465, 1466) | Hypothetical protein [Arabidopsis thaliana] | | | |
| 414 | 100402081 | Novel Protein sim. GBank gi\|2833647 (AF027972) - | | UNCLASSIFIED | 1022, 1030, 1040, |
| | (935, 936) | flagelliform silk protein [Nephila clavipes] | | | 1042 |
| 415 | 100417152 | Novel Protein sim. GBank gi\|293338 (L12703) - engrailed | | UNCLASSIFIED | 1000, 1012, 1013, |
| | (1935, 1936) | protein [Mus musculus] | | | 1014, 1022, 1024, |
| | | | | | 1030, 1033, 1040, |
| | | | | | 1042 |
| 416 | 87941423 | Novel Protein sim. GBank gi\|2960161\|emb\|CAA18059.1\| - | | UNCLASSIFIED | 1022 |
| | (627, 628) | (AL022121) hypothetical protein Rv3737 [Mycobacterium | | | |
| | | tuberculosis] | | | |
| 417 | 87915691 | Novel Protein sim. GBank gi\|2981631\|dbj\|BAA25253.1\| - | | UNCLASSIFIED | 1022 |
| | (471, 472) | (AB012223) ORF2 [Canis familiaris] | | | |
| 418 | 87942511 | Novel Protein sim. GBank gi\|2983213 (AE000697) - | | UNCLASSIFIED | 1022 |
| | (127, 128) | mannose-6-phosphate isomerase/mannose-1-phosphate | | | |
| | | guanyl transferase [Aguifex aeolicus] | | | |
| 419 | 100403097 | Novel Protein sim. GBank gi\|2997591 (AF020814) - | | UNCLASSIFIED | 1004, 1014, 1022, |
| | (1267, 1268) | glucose-6-phosphate/phosphate-translocator precursor | | | 1024, 1037, 1040, |
| | | [Pisum sativum] | | | 1042 |
| 420 | 87932918 | Novel Protein sim. GBank | | UNCLASSIFIED | 1022 |
| | (75, 76) | gi\|3025179\|sp\|O07523\|YHAP_BACSU - HYPOTHETICAL | | | |
| | | 45.4 KD PROTEiN IN SSPB-PRSA INTERGENIC | | | |
| | | REGION | | | |
| 421 | 100398135 | Novel Protein sim. GBank gi\|3041847 (AC004542) - | | UNCLASSIFIED | 1019, 1022 |
| | (913, 914) | OXYSTEROL-BINDING PROTEIN-like; similar to | | | |
| | | P22059 (PID:g129308) [Homo sapiens] | | | |
| 422 | 87933210 | Novel Protein sim. GBank | | UNCLASSIFIED | 1022 |
| | (503, 504) | gi\|3122846\|sp\|P71533\|SECA_MYCSM - PREPROTEIN | | | |
| | | TRANSLOCASE SECA SUBUNIT | | | |
| 423 | 87937045 | Novel Protein sim. GBank | | UNCLASSIFIED | 1022 |
| | (31, 32) | gi\|3123021\|sp\|Q90508\|VIT1_FUNHE - VITELLOGENIN I | | | |
| | | PRECURSOR (VTG1) (CONTAINS: LIPOVITELLIN 1 | | | |
| | | (LV1); PHOSVITIN (PV); LIPOVITELLIN 2 (LV2)) | | | |
| 424 | 100392974 | Novel Protein sim. GBank gi\|3150253\|emb\|CAA19172\| - | | UNCLASSIFIED | 1011, 1022, 1026, |
| | (1913, 1914) | (AL023634) hypothetical protein [Schizosaccharomyces | | | 1040, 1041, 1042 |
| | | pombe] | | | |
| 425 | 100417423 | Novel Protein sim. GBank gi\|320975\|pir\|\|C44805 - eggshell | | UNCLASSIFIED | 1022, 1024, 1040, |
| | (2043, 2044) | protein - fluke (Schistosoma haematobium) (clone SH.E 6- | | | 1041, 1042 |
| | | 1) | | | |
| 426 | 100347115 | Novel Protein sim. GBank gi\|3319990\|emb\|CAA76720\| - | | UNCLASSIFIED | 1022, 1024, 1037, |
| | (889, 890) | (Y17267) ubiguitin-conjugating enzyme [Mus musculus] | | | 1042 |
| 427 | 87923652 | Novel Protein sim. GBank gi\|3327056\|dbj\|BAA31596\| - | | UNCLASSIFIED | 1022 |
| | (1839, 1840) | (AB014521) KIAA0621 protein [Homo sapiens] | | | |
| 428 | 87938141 | Novel Protein sim. GBank gi\|3342234 (U93909) -nuclear | | UNCLASSIFIED | 1022 |
| | (225, 226) | antigen EBNA-1 [Cercopithecine herpesvirus 15] | | | |
| 429 | 100348111 | Novel Protein sim. GBank gi\|3413320\|emb\|CAA06915\| - | | UNCLASSIFIED | 1022, 1030 |
| | (1193, 1194) | (AJ006215) CMP-N-acetylneuraminic acid synthetase [Mus | | | |
| | | musculus] | | | |
| 430 | 87935595 | Novel Protein sim. GBank gi\|3702295 (AC005783) - | | UNCLASSIFIED | 1022 |
| | (987, 988) | R33083_1 [Homo sapiens] | | | |
| 431 | 87916755 | Novel Protein sim. GBank gi\|3738265\|dbj\|BAA33805\| - | | UNCLASSIFIED | 1022 |
| | (2059, 2060) | (AB018423) SH2 domain-containing protein [Mus | | | |
| | | musculus] | | | |
| 432 | 100398086 | Novel Protein sim. GBank gi\|3758795\|emb\|CAB07531\| - | | UNCLASSIFIED | 1022, 1040 |
| | (909, 910) | (Z93244) bK116F5.2 (PUTATIVE RhoGAP (CDC42 | | | |
| | | GTPAse Activating Protein) LIKE protein) [Homo sapiens] | | | |
| 433 | 87941072 | Novel Protein sim. GBank gi\|3860718\|emb\|CAA14619\| - | | UNCLASSIFIED | 1022 |
| | (463, 464) | (AJ235270) GLUTAMYL-tRNA AMIDOTRANSFERASE | | | |
| | | SUBUNIT B (gatB) [Rickettsia prowazekii] | | | |
| 434 | 87928387 | Novel Protein sim. GBank gi\|3874149\|emb\|CAA97423.1\| - | | UNCLASSIFIED | 1022 |
| | (967, 968) | (Z73103) predicted using Genefinder [Caenorhabditis | | | |
| | | elegans] | | | |
| 435 | 87921069 | Novel Protein sim. GBank gi\|3877645\|emb\|CAB05741\| - | | UNCLASSIFIED | 1022 |
| | (1443, 1444) | (Z83230) cDNA EST yk355g3.5 comes from this gene | | | |
| | | [Caenorhabditis elegans] | | | |
| 436 | 100401492 | Novel Protein sim. GBank gi\|3880930\|emb\|CAA16334.1\| - | | UNCLASSIFIED | 1022, 1030, 1040 |
| | (1229, 1230) | (AL021481) similar to Phosphoglucomutase and | | | |
| | | phosphomannomutase phosphoserine; cDNA EST | | | |
| | | EMBL:D36168 comes from this gene; cDNA EST | | | |
| | | EMBL:D70697 comes from this gene; cDNA EST | | | |
| | | yk373h9.5 comes from this gene; cDNA EST | | | |
| | | EMBL:T0080 . . . | | | |
| 437 | 100340173 | Novel Protein sim. GBank gi\|3894169 (AC005312) - | | UNCLASSIFIED | 1022, 1042 |
| | (745, 746) | hypothetical protein [Arabidopsis thaliana] | | | |
| 438 | 87938149 | Novel Protein sim. GBank | | UNCLASSIFiED | 1022 |
| | (227, 228) | gi\|3913791\|sp\|O22493\|GSH1_LYCES - GLUTAMATE-- | | | |
| | | CYSTEINE LIGASE PRECURSOR (GAMMA- | | | |
| | | GLUTAMYLCYSTEINE SYNTHETASE) (GAMMA- | | | |
| | | ECS) (GCS) | | | |
| 439 | 87917873 | Novel Protein sim. GBank gi\|3983150 (AF099973) - | | UNCLASSIFIED | 1022 |
| | (1083, 1084) | schlafen2 [Mus musculus] | | | |
| 440 | 87933029 | Novel Protein sim. GBank gi\|4007672\|emb\|CAA22358\| - | | UNCLASSIFIED | 1022 |
| | (433, 434) | (AL034443) putative transcriptional regulatory protein | | | |
| | | [Streptomyces coelicolor] | | | |
| 441 | 100340558 | Novel Protein sim. GBank gi\|4220590\|dbj\|BAA74579\| - | | UNCLASSIFIED | 1022, 1040 |
| | (765, 766) | (D87908) nuclear protein np95 [Mus musculus | | | |
| 442 | 101320710 | Novel Protein sim. GBank gi\|4262296\|gb\|AAD14548\| - | | UNCLASSIFIED | 1022 |
| | (1803, 1804) | (AF072508) envelope protein [Homo sapiens] | | | |
| 443 | 100392343 | Novel Protein sim. GBank gi\|4336692\|gb\|AAD17897\| - | | UNCLASSIFIED | 1022, 1037 |
| | (1667, 1668) | (AF101361) Abnormal X segregation [Drosophila | | | |
| | | melanogaster] | | | |
| 444 | 100402824 | Novel Protein sim. GBank gi\|4495063\|emb\|CAB39181.1\| - | | UNCLASSIFIED | 1014, 1022 |
| | (1403, 1404) | (Z85986) dJ108K11.3 (similar to yeast suppressor protein | | | |
| | | SRP40) [Homo sapiens] | | | |
| 445 | 87938467 | Novel Protein sim. GBank | | UNCLASSIFIED | 1022 |
| | (755, 756) | gi\|4502491\|ref\|NP_001203.1\|pC1QB - complement | | | |
| | | component 1, q subcomponent binding protein | | | |
| 446 | 87941683 | Novel Protein sim. GBank | | UNCLASSIFIED | 1022 |
| | (101, 102) | gi\|4505197\|ref\|NP_003473.1\|pMLL2 - myeloid/lymphoid or | | | |
| | | mixed-lineage leukemia 2 | | | |
| 447 | 100400337 | Novel Protein sim. GBank | | UNCLASSIFIED | 1000, 1012, 1013, |
| | (1041, 1042) | gi\|4507367\|ref\|NP_003182.1\|pTARS - threonyl-tRNA | | | 1022, 1026, 1030, |
| | | synthetase | | | 1033, 1040, 1041, |
| | | | | | 1042 |
| 448 | 100401887 | Novel Protein sim. GBank | | UNCLASSIFIED | 1022, 1025, 1026, |
| | (1315, 1316) | gi\|4507367\|ref\|NP_003182.1\|pTARS - threonyl-tRNA | | | 1030 |
| | | synthetase | | | |
| 449 | 87937923 | Novel Protein sim. GBank gi\|4512671\|gb\|AAD21725.1\| - | | UNCLASSIFIED | 1022 |
| | (279, 280) | (AC006931) unknown protein [Arabidopsis thaliana] | | | |
| 450 | 87939304 | Novel Protein sim. GBank gi\|451544 (U04267) - proline- | | UNCLASSIFIED | 1022 |
| | (317, 318) | rich cell wall protein [Gossypium barbadense] | | | |
| 451 | 100417037 | Novel Protein sim. GBank gi\|4678899\|emb\|CAB41271.1\| - | | UNCLASSIFIED | 1022, 1024, 1042 |
| | (1929, 1930) | (AL049707) putative large glycine/alanine rich protein | | | |
| | | [Streptomyces coelicolor] | | | |
| 452 | 87935372 | Novel Protein sim. GBank gi\|480894\|pir\|\|S37482 - finger | | UNCLASSIFIED | 1022 |
| | (1169, 1170) | protein ZNF74-1 - human | | | |
| 453 | 100341339 | Novel Protein sim. GBank gi\|4886449\|emb\|CAB43396.1\| - | | UNCLASSIFIED | 1022, 1040 |
| | (1623, 1624) | (AL050297) hypothetical protein [Homo sapiens] | | | |
| 454 | 87935985 | Novel Protein sim. GBank | | UNCLASSIFIED | 1022 |
| | (165, 166) | gi\|4928286\|gb\|AAD33522.1\|AF13212 - (AF132127) | | | |
| | | phosphotransferase enzyme IIC [Streptococcus mutans] | | | |
| 455 | 100402255 | Novel Protein sim. GBank | | UNCLASSIFIED | 1022, 1040 |
| | (1253, 1254) | gi\|4929585\|gb\|AAD34053.1\|AF15181 -(AF151816) CGI-58 | | | |
| | | protein [Homo sapiens] | | | |
| 456 | 87938246 | Novel Protein sim. GBank | | UNCLASSIFIED | 1022 |
| | (235, 236) | gi\|4982442\|gb\|AAD36919.1\|AE00182 - (AE001823) | | | |
| | | conserved hypothetical protein [Thermotoga maritima] | | | |
| 457 | 87940554 | Novel Protein sim. GBank gi\|4995303\|emb\|CAB44308.1\| - | | UNCLASSIFIED | 1022 |
| | (1987, 1988) | (AJ242724) putative mitogen-activated protein kinase | | | |
| | | kinase kinase [Homo sapiens] | | | |
| 458 | 87933380 | Novel Protein sim. GBank | | UNCLASSIFIED | 1022 |
| | (1981, 1982) | gi\|5091669\|gb\|AAD39617.1\|AF02616 - (AF026169) SALF | | | |
| | | [Homo sapiens] | | | |
| 459 | 87940405 | Novel Protein sim. GBank gi\|5420387\|emb\|CAB46679.1\| - | | UNCLASSIFIED | 1022 |
| | (511, 512) | (AJ243459) proteophosphoglycan [Leishmania major] | | | |
| 460 | 87930307 | Novel Protein sim. GBank gi\|5420389\|emb\|CAB46680.1\| - | | UNCLASSIFIED | 1022 |
| | (335, 336) | (AJ243460) proteophosphoglycan [Leishmania major] | | | |
| 461 | 87942252 | Novel Protein sim. GBank gi\|5420389\|emb\|CAB46680.1\| - | | UNCLASSIFIED | 1022 |
| | (653, 654) | (AJ243460) proteophosphoglycan [Leishmania major] | | | |
| 462 | 87937504 | Novel Protein sim. GBank gi\|5458403\|emb\|CAB49891.1\| - | | UNCLASSIFIED | 1022 |
| | (205, 206) | (AJ248286) PAB1720 [Pyrococcus abyssi] | | | |
| 463 | 100397244 | Novel Protein sim. GBank | | UNCLASSIFIED | 1022 |
| | (679, 680) | gi\|5524667\|gb\|AAD44333.1\|AF15935 - (AF159356) | | | |
| | | Munc 13-4 protein [Rattus norvegicus] | | | |
| 464 | 100397262 | Novel Protein sim. GBank | | UNCLASSIFIED | 1022, 1024, 1037 |
| | (681, 682) | gi\|5524667\|gb\|AAD44333.1\|AF15935 - (AF159356) | | | |
| | | Munc 13-4 protein [Rattus norvegicus] | | | |
| 465 | 87932893 | Novel Protein sim. GBank gi\|5688851\|dbj\|BAA82702.1\| - | | UNCLASSIFIED | 1022 |
| | (583, 584) | (AB017438) Orf5 [Streptomyces coelicolor] | | | |
| 466 | 87922022 | Novel Protein sim. GBank gi\|5689421\|dbj\|BAA82994.1\| - | | UNCLASSIFIED | 1022 |
| | (1567, 1568) | (AB028965) KIAA1042 protein [Homo sapiens] | | | |
| 467 | 87933400 | Novel Protein sim. GBank gi\|5689519\|dbj\|BAA83043.1\| - | | UNCLASSIFIED | 1022 |
| | (863, 864) | (AB029014) KIAA1091 protein [Homo sapiens] | | | |
| 468 | 100394811 | Novel Protein sim. GBank gi\|631703\|pir\|\|S44925 - IB3/5- | | UNCLASSIFIED | 1022, 1024, 1042 |
| | (1027, 1028) | polypeptide - mouse | | | |
| 469 | 87943027 | Novel Protein sim. GBank gi\|699382 (U15187)- cpsA gene | | UNCLASSIFIED | 1022 |
| | (669, 670) | product [Mycobacterium leprae] | | | |
| 470 | 100341724 | Novel Protein sim. GBank gi\|728510\|dbj\|BAA085471\| - | | UNCLASSIFIED | 1013, 1022, 1030, |
| | (1741, 1742) | (D49698) 95.1KD putative nonstructural protein | | | 1040, 1042 |
| | | [Nilaparvata lugens reovirus] | | | |
| 471 | 100344431 | Novel Protein sim. GBank | | UNCLASSIFIED | 1022, 1028, 1030, |
| | (2005, 2006) | gi\|728831\|sp\|P39188\|ALU1_HUMAN - !!!! ALU | | | 1042 |
| | | SUBFAMILY J WARNNG ENTRY !!!! | | | |
| 472 | 87929402 | Novel Protein sim. GBank | | UNCLASSIFIED | 1022 |
| | (737, 738) | gi\|728834\|sp\|P39191\|ALU4_HUMAN - !!!! ALU | | | |
| | | SUBFAMILY SB2 WARNING ENTRY !!!! | | | |
| 473 | 100343987 | Novel Protein sim. GBank gi\|854065\|emb\|CAA58337\| - | | UNCLASSIFIED | 1006, 1013, 1022, |
| | (1009, 1010) | (X83413) U88 [Human herpesvirus 6] | | | 1024, 1030, 1033, |
| | | | | | 1040, 1042 |
| 474 | 100396813 | Novel Protein sim. GBank gi\|854065\|emb\|CAA58337\| - | | UNCLASSIFIED | 1013, 1014, 1022, |
| | (1197, 1198) | (X83413) U88 [Human herpesvirus 6] | | | 1026, 1039, 1040, |
| | | | | | 1042 |
| 475 | 100342004 | Novel Protein sim. GBank gi\|93144\|pir\|\|B40505 - | | UNCLASSIFIED | 1022 |
| | (1513, 1514) | hypothetical protein - suid herpesvirus 1 (strain Indiana- | | | |
| | | Funkhuser or Becker) | | | |
| 476 | 87934792 | | | UNCLASSIFIED | 1022 |
| | (7, 8) | | | | |
| 477 | 87936169 | | | UNCLASSIFIED | 1022 |
| | (23, 24 | | | | |
| 478 | 87942879 | | | UNCLASSIFIED | 1022 |
| | (49, 50) | | | | |
| 479 | 87942901 | | | UNCLASSIFIED | 1022 |
| | (51, 52) | | | | |
| 480 | 87942952 | | | UNCLASSIFIED | 1022 |
| | (55, 56) | | | | |
| 481 | 87935181 | | | UNCLASSIFIED | 1022 |
| | (89, 90) | | | | |
| 482 | 87936025 | | | UNCLASSIFIED | 1022 |
| | (93, 94) | | | | |
| 483 | 87942438 | | | UNCLASSIFIED | 1022 |
| | (111, 112) | | | | |
| 484 | 87942442 | | | UNCLASSIFIED | 1022 |
| | (113, 114) | | | | |
| 485 | 87942475 | | | UNCLASSIFIED | 1022 |
| | (121, 122) | | | | |
| 486 | 88321197 | | | UNCLASSIFIED | 1022 |
| (129, 130) | | | | | |
| 487 | 88321204 | | | UNCLASSIFIED | 1022 |
| | (131, 132) | | | | |
| 488 | 87936106 | | | UNCLASSIFIED | 1022 |
| | (147, 148) | | | | |
| 489 | 87919926 | | | UNCLASSIFIED | 1022 |
| | (151, 152) | | | | |
| 490 | 87928644 | | | UNCLASSIFIED | 1022 |
| | (153, 154) | | | | |
| 491 | 87935870 | | | UNCLASSIFIED | 1022 |
| | (161, 162) | | | | |
| 492 | 87937265 | | | UNCLASSIFIED | 1022 |
| | (185, 186) | | | | |
| 493 | 87936731 | | | UNCLASSIFIED | 1022 |
| | (195, 196) | | | | |
| 494 | 87937468 | | | UNCLASSIFIED | 1022 |
| | (203, 204) | | | | |
| 495 | 87937508 | | | UNCLASSIFIED | 1022 |
| | (207, 208) | | | | |
| 496 | 87937600 | | | UNCLASSIFIED | 1022 |
| | (213, 214) | | | | |
| 497 | 87938121 | | | UNCLASSIFIED | 1022 |
| | (219, 220) | | | | |
| 498 | 87938153 | | | UNCLASSIFIED | 1022 |
| | (229, 230) | | | | |
| 499 | 87938369 | | | UNCLASSIFIED | 1022 |
| | (243, 244) | | | | |
| 500 | 87921032 | | | UNCLASSIFIED | 1022 |
| | (255, 256) | | | | |
| 501 | 87937683 | | | UNCLASSIFIED | 1022 |
| | (263, 264) | | | | |
| 502 | 87937895 | | | UNCLASSIFIED | 1022 |
| | (277, 278) | | | | |
| 503 | 87938477 | | | UNCLASSIFIED 1022 | |
| | (291, 292) | | | | |
| 504 | 87938489 | | | UNCLASSIFIED | 1022 |
| | (295, 296) | | | | |
| 505 | 87939110 | | | UNCLASSIFIED | 1022 |
| | (309, 310) | | | | |
| 506 | 87939355 | UNCLASSIFIED | 1022 | | |
| | (321, 322) | | | | |
| 507 | 87920914 | | | UNCLASSIFIED | 1022 |
| | (327, 328) | | | | |
| 508 | 87930109 | | | UNCLASSIFIED | 1022 |
| | (333, 334) | | | | |
| 509 | 87938759 | | | UNCLASSIFIED | 1022 |
| | (339, 340) | | | | |
| 510 | 87939640 | | | UNCLASSIFIED | 1022 |
| | (355, 356) | | | | |
| 511 | 87914579 | | | UNCLASSIFIED | 1022 |
| | (371, 372) | | | | |
| 512 | 87916035 | UNCLASSIFIED | 1022 | | |
| | (375, 376) | | | | |
| 513 | 87921885 | | | UNCLASSIFIED | 1022 |
| | (379, 380) | | | | |
| 514 | 87922504 | | | UNCLASSIFIED | 1022 |
| | (381, 382) | | | | |
| 515 | 87940005 | | | UNCLASSIFIED | 1022 |
| | (391, 392) | | | | |
| 516 | 87916346 | | | UNCLASSIFIED | 1022 |
| | (407, 408) | | | | |
| 517 | 87916367 | | | UNCLASSIFIED | 1022 |
| | (409, 410) | | | | |
| 518 | 87921997 | | | UNCLASSIFIED | 1022 |
| | (417, 418) | | | | |
| 519 | 87923445 | | | UNCLASSIFIED | 1022 |
| | (419, 420) | | | | |
| 520 | 87923534 | | | UNCLASSIFIED | 1022 |
| | (423, 424) | | | | |
| 521 | 87932359 | | | UNCLASSIFIED | 1022 |
| | (431, 432) | | | | |
| 522 | 87940130 | | | UNCLASSIFIED | 1022 |
| | (437, 438) | | | | |
| 523 | 87940170 | | | UNCLASSIFIED | 1022 |
| | (443, 444) | | | | |
| 524 | 87940205 | | | UNCLASSIFIED | 1022 |
| | (449, 450) | | | | |
| 525 | 87941076 | | | UNCLASSIFIED | 1022 |
| | (465, 466) | | | | |
| 526 | 87916594 | | | UNCLASSIFIED | 1022 |
| | (479, 480) | | | | |
| 527 | 87932528 | | | UNCLASSIFIED | 1022 |
| | (495, 496) | | | UNCLASSIFIED | 1022 |
| 528 | 87934037 | | | UNCLASSIFIED | 1022 |
| | (509, 510) | | | | |
| 529 | 87940546 | | | UNCLASSIFIED | 1022 |
| | (531, 532) | | | | |
| 530 | 87940629 | | | UNCLASSIFIED | 1022 |
| | (545, 546) | | | | |
| 531 | 87942039 | | | UNCLASSIFIED | 1022 |
| | (571, 572) | | | | |
| 532 | 87916882 | | | UNCLASSIFIED | 1022 |
| | (577, 578) | | | | |
| 533 | 87933409 | | | UNCLASSIFIED | 1022 |
| | (585, 586) | | | | |
| 534 | 87933460 | | | UNCLASSIFIED | 1022 |
| | (587, 588) | | | | |
| 535 | 87933611 | | | UNCLASSIFIED | 1022 |
| | (589, 590) | | | | |
| 536 | 87934278 | | | UNCLASSIFIED | 1022 |
| | (603, 604) | | | | |
| 537 | 87934298 | | | UNCLASSIFIED | |
| | (607, 608) | | | | |
| 538 | 87934307 | | | UNCLASSIFIED | 1022 |
| | (609, 610) | | | | |
| 539 | 87940923 | | | UNCLASSIFIED | 1022 |
| | (623, 624) | | | | |
| 540 | 87943019 | | | UNCLASSIFIED | 1022 |
| | (667, 668) | | | | |
| 541 | 100398000 | | | UNCLASSIFIED | 1012, 1022, 1030, |
| | (685, 686) | | | | 1040 |
| 542 | 100401426 | | | UNCLASSIFIED | 1022, 1041 |
| | (689, 690) | | | | |
| 543 | 87934563 | | | UNCLASSIFIED | 1022 |
| | (711, 712) | | | | |
| 544 | 87919369 | | | UNCLASSIFIED | 1022 |
| | (717, 718) | | | | |
| 545 | 87934624 | | | UNCLASSIFIED | 1022 |
| | (719, 720) | | | | |
| 546 | 100381014 | | | UNCLASSIFIED | 1012, 1022 |
| | (723, 724) | | | | |
| 547 | 100398572 | | | UNCLASSIFIED | 1022, 1040 |
| | (727, 728) | | | | |
| 548 | 101724564 | | | UNCLASSIFIED | 1022 |
| | (729, 730) | | | | |
| 549 | 87920255 | | | UNCLASSIFIED | 1022 |
| | (731, 732) | | | | |
| 550 | 87936969 | | | UNCLASSIFIED | 1022 |
| | (751, 752) | | | | |
| 551 | 87937760 | | | UNCLASSIFIED | 1022 |
| | (753, 754) | | | | |
| 552 | 100340548 | | | UNCLASSIFIED | 1022 |
| | (763, 764) | | | | |
| 553 | 100359332 | | | UNCLASSIFIED | 1022, 1042 |
| | (771, 772) | | | | |
| 554 | 100359528 | | | UNCLASSIFIED | 1022, 1040 |
| | (793, 794) | | | | |
| 555 | 87914643 | | | UNCLASSIFIED | 1022 |
| | (801, 802) | | | | |
| 556 | 87916055 | | | UNCLASSIFIED | 1022 |
| | (803, 804) | | | | |
| 557 | 87930883 | | | UNCLASSIFIED | 1022 |
| | (825, 826) | | | | |
| 558 | 87932216 | | | UNCLASSIFIED | 1022 |
| | (829, 830) | | | | |
| 559 | 87925195 | | | UNCLASSIFIED | 1022 |
| | (839, 840) | | | | |
| 560 | 87940633 | | | UNCLASSIFIED | 1022 |
| | (843, 844) | | | | |
| 561 | 100395379 | | | UNCLASSIFIED | 1004, 1022, 1042 |
| | (853, 854) | | | | |
| 562 | 87917372 | | | UNCLASSIFIED | 1022 |
| | (857, 858) | | | | |
| 563 | 87932873 | | | UNCLASSIFIED | 1022 |
| | (861, 862) | | | | |
| 564 | 100339105 | | | UNCLASSIFIED | 1013, 1022 |
| | (879, 880) | | | | |
| 565 | 100395923 | | | UNCLASSIFIED | 1010, 1022 |
| | (897, 898) | | | | |
| 566 | 100397266 | | | UNCLASSIFIED | 1022, 1026 |
| | (903, 904) | | | | |
| 567 | 100397350 | | | UNCLASSIFIED | 1022, 1042 |
| | (907, 908) | | | | |
| 568 | 100400615 | | | UNCLASSIFIED | 1022, 1040, 1042 |
| | (917, 918) | | | | |
| 569 | 100400662 | | | UNCLASSIFIED | 1022, 1030 |
| | (921, 922) | | | | |
| 570 | 100400688 | | | UNCLASSIFIED | 1002, 1022, 1023, |
| | (923, 924) | | | | 1026, 1040, 1042 |
| 571 | 100402101 | | | UNCLASSIFIED | 1002, 1022, 1028, |
| | (939, 940) | | | | 1040 |
| 572 | 87928259 | | | UNCLASSIFIED | 1022 |
| | (965, 966) | | | | |
| 573 | 87934815 | | | UNCLASSIFIED | 1022 |
| | (973, 974) | | | | |
| 574 | 87934914 | | | UNCLASSIFIED | 1022 |
| | (975, 976) | | | | |
| 575 | 87934939 | | | UNCLASSIFIED | 1022 |
| | (979, 980) | | | | |
| 576 | 87936175 | | | UNCLASSIFIED | 1022 |
| | (989, 990) | | | | |
| 577 | 87936203 | | | UNCLASSIFIED | 1022 |
| | (993, 994) | | | | |
| 578 | 87936226 | | | UNCLASSIFIED | 1022 |
| | (995, 996) | | | | |
| 579 | 87937029 | | | UNCLASSIFIED | 1022 |
| | (1001, 1002) | | | | |
| 580 | 87937073 | | | UNCLASSIFIED | 1022 |
| | (1005, 1006) | | | | |
| 581 | 100345412 | | | UNCLASSIFIED | 1022, 1024 |
| | (1011, 1012) | | | | |
| 582 | 100394889 | | | UNCLASSIFIED | 1022, 1030, 1040, |
| | (1031, 1032) | | | | 1042 |
| 583 | 100395491 | | | UNCLASSIFIED | 1022, 1040, 1042 |
| | (1033, 1034) | | | | |
| 584 | 100401008 | | | UNCLASSIFIED | 1022, 1030, 1033 |
| | (1045, 1046) | | | | |
| 585 | 100401062 | | | UNCLASSIFIED | 1011, 1017, 1022, |
| | (1047, 1048) | | | | 1037 |
| 586 | 100416840 | | | UNCLASSIFIED | 1013, 1022, 1042 |
| | (1053, 1054) | | | | |
| 587 | 100417562 | | | UNCLASSIFIED | 1022, 1033, 1040 |
| | (1063, 1064) | | | | |
| 588 | 100417792 | | | UNCLASSIFIED | 1022, 1041 |
| | (1065, 1066) | | | | |
| 589 | 100417797 | | | UNCLASSIFIED | 1022, 1040 |
| | (1067, 1068) | | | | |
| 590 | 87916930 | | | UNCLASSIFIED | 1022 |
| | (1077, 1078) | | | | |
| 591 | 87925784 | | | UNCLASSIFIED | 1022 |
| | (1089, 1090) | | | | |
| 592 | 87933712 | | | UNCLASSIFIED | 1022 |
| | (1097, 1098) | | | | |
| 593 | 87941675 | | | UNCLASSIFIED | 1022 |
| | (1109, 1110) | | | | |
| 594 | 87941751 | | | UNCLASSIFIED | 1022 |
| | (1111, 1112) | | | | |
| 595 | 87941755 | | | UNCLASSIFIED | 1022 |
| | (1113, 1114) | | | | |
| 596 | 87941835 | | | UNCLASSIFIED | 1022 |
| | (1117, 1118) | | | | |
| 597 | 87941886 | | | UNCLASSIFIED | 1022 |
| | (1119, 1120) | | | | |
| 598 | 87942591 | | | UNCLASSIFIED | 1022 |
| | (1125, 1126) | | | | |
| 599 | 100339029 | | | UNCLASSIFIED | 1012, 1022, 1024, |
| | (1127, 1128) | | | | 1026, 1033, 1040, |
| | | | | | 1042 |
| 600 | 100400442 | | | UNCLASSIFIED | 1013, 1017, 1022, |
| | (1141, 1142) | | | | 1026, 1040, 1041, |
| | | | | | 1042 |
| 601 | 100401160 | | | UNCLASSIFIED | 1009, 1022 |
| | (1151, 1152) | | | | |
| 602 | 87918677 | | | UNCLASSIFIED | 1022 |
| | (1163, 1164) | | | | |
| 603 | 87927349 | | | UNCLASSIFIED | 1022 |
| | (1165, 1166) | | | | |
| 604 | 87941966 | | | UNCLASSIFIED | 1022 |
| | (1177, 1178) | | | | |
| 605 | 87942607 | | | UNCLASSIFIED | 1022 |
| | (1181, 1182) | | | | |
| 606 | 100339433 | | | UNCLASSIFIED | 1000, 1022, 1030, |
| | (1183, 1184) | | | | 1040 |
| 607 | 100397563 | | | UNCLASSIFIED | 1014, 1022, 1033, |
| | (1201, 1202) | | | | 1040 |
| 608 | 100398244 | | | UNCLASSIFIED | 1022, 1030, 1037, |
| | (1207, 1208) | | | | 1040 |
| 609 | 100400759 | | | UNCLASSIFIED | 1014, 1022, 1042 |
| | (1213, 1214) | | | | |
| 610 | 100400760 | | | UNCLASSIFIED | 1000, 1006, 1010, |
| | (1215, 1216) | | | | 1012, 1013, 1014, |
| | | | | | 1022, 1024, 1025, |
| | | | | | 1026, 1030, 1033, |
| | | | | | 1040, 1042 |
| 611 | 100400803 | | | UNCLASSIFIED | 1011, 1022, 1030, |
| | (1217, 1218) | | | | 1037, 1040 |
| 612 | 100400823 | | | UNCLASSIFIED | 1022, 1026 |
| | (1219, 1220) | | | | |
| 613 | 100402246 | | | UNCLASSIFIED | 1000, 1022, 1030, |
| | (1251, 1252) | | | | 1040 |
| 614 | 100402333 | | | UNCLASSIFIED | 1022, 1033 |
| | (1255, 1256) | | | | |
| 615 | 100402358 | | | UNCLASSIFIED | 1006, 1022, 1024, |
| | (1257, 1258) | | | | 1030, 1040, 1042 |
| 616 | 100402368 | | | UNCLASSIFIED | 1022, 1030 |
| | (1259, 1260) | | | | |
| 617 | 87919710 | | | UNCLASSIFIED | 1022 |
| | (1273, 1274) | | | | |
| 618 | 87928450 | | | UNCLASSIFIED | 1022 |
| | (1281, 1282) | | | | |
| 619 | 87935771 | | | UNCLASSIFIED | 1022 |
| | (1283, 1284) | | | | |
| 620 | 87935958 | | | UNCLASSIFIED | 1022 |
| | (1285, 1286) | | | | |
| 621 | 87935973 | | | UNCLASSIFIED | 1022 |
| | (1287, 1288) | | | | |
| 622 | 87937390 | | | UNCLASSIFIED | 1022 |
| | (1293, 1294) | | | | |
| 623 | 100349246 | | | UNCLASSIFIED | 1022, 1024, 1033 |
| | (1301, 1302) | | | | |
| 624 | 100401731 | | | UNCLASSIFIED | 1006, 1009, 1010, |
| | (1309, 1310) | | | | 1011, 1012, 1013, |
| | | | | | 1014, 1022, 1024, |
| | | | | | 1039, 1040, 1042 |
| 625 | 100401981 | | | UNCLASSIFIED | 1022, 1037 |
| | (1317, 1318) | | | | |
| 626 | 100402597 | | | UNCLASSIFIED | 1001, 1012, 1014, |
| | (1325, 1326) | | | | 1022, 1024, 1030, |
| | | | | | 1033, 1037, 1040, |
| | | | | | 1042 |
| 627 | 100402602 | | | UNCLASSIFIED | 1012, 1022, 1036, |
| | (1327, 1328) | | | | 1040 |
| 628 | 100419937 | | | UNCLASSIFIED | 1010, 1013, 1014, |
| | (1341, 1342) | | | | 1022, 1030, 1040, |
| | | | | | 1042 |
| 629 | 87920146 | | | UNCLASSIFIED | 1022 |
| | (1349, 1350) | | | | |
| 630 | 87938234 | | | UNCLASSIFIED | 1022 |
| | (1355, 1356) | | | | |
| 631 | 87938329 | | | UNCLASSIFIED | 1022 |
| | (1361, 1362) | | | | |
| 632 | 100339926 | | | UNCLASSIFIED | 1022, 1024, 1026, |
| | (1365, 1366) | | | | 1042 |
| 633 | 100348737 | | | UNCLASSIFIED | 1022, 1030, 1040 |
| | (1369, 1370) | | | | |
| 634 | 100356841 | | | UNCLASSIFIED | 1022, 1040, 1041 |
| | (1377, 1378) | | | | |
| 635 | 100399453 | | | UNCLASSIFIED | 1022, 1040 |
| | (1387, 1388) | | | | |
| 636 | 100399478 | | | UNCLASSIFIED | 1022, 1030, 1040, |
| | (1389, 1390) | | | | 1042 |
| 637 | 100402802 | | | UNCLASSIFIED | 1022, 1030 |
| | (1401, 1402) | | | | |
| 638 | 100403406 | | | UNCLASSIFIED | 1022, 1024 |
| | (1415, 1416) | | | | |
| 639 | 100403449 | | | UNCLASSIFIED | 1022, 1026 |
| | (1417, 1418) | | | | |
| 640 | 87920301 | | | UNCLASSIFIED | 1022 |
| | (1425, 1426) | | | | |
| 641 | 87920356 | | | UNCLASSIFIED | 1022 |
| | (1427, 1428) | | | | |
| 642 | 87920457 | | | UNCLASSIFIED | 1022 |
| | (1435, 1436) | | | | |
| 643 | 87920501 | | | UNCLASSIFIED | 1022 |
| | (1439, 1440) | | | | |
| 644 | 87920509 | | | UNCLASSIFIED | 1022 |
| | (1441, 1442) | | | | |
| 645 | 87937824 | | | UNCLASSIFIED | 1022 |
| | (1455, 1456) | | | | |
| 646 | 87937828 | | | UNCLASSIFIED | 1022 |
| | (1457, 1458) | | | | |
| 647 | 87938513 | | | UNCLASSIFIED | 1022 |
| | (1463, 1464) | | | | |
| 648 | 87938529 | | | UNCLASSIFIED | 1022 |
| | (1467, 1468) | | | | |
| 649 | 87938611 | | | UNCLASSIFIED | 1022 |
| | (1471, 1472) | | | | |
| 650 | 87938673 | | | | |
| (1473, 1474) | | | | | |
| 651 | 100340222 | | | UNCLASSIFIED | 1014, 1017, 1022, |
| | (1483, 1484) | | | | 1042 |
| 652 | 100340334 | | | UNCLASSIFIED | 1011, 1014, 1017, |
| | (1489, 1490) | | | | 1022, 1024, 1026, |
| | | | | | 1040, 1042 |
| 653 | 100340503 | | | UNCLASSIFIED | 1000, 1003, 1013, |
| | (1497, 1498) | | | | 1014, 1022, 1024, |
| | | | | | 1028, 1040, 1042 |
| 654 | 100341008 | | | UNCLASSIFIED | 1022, 1042 |
| | (1499, 1500) | | | | |
| 655 | 100341043 | | | UNCLASSIFIED | 1000, 1011, 1012, |
| | (1503, 1504) | | | | 1013, 1022, 1025, |
| | | | | | 1026, 1030, 1033, |
| | | | | | 1039, 1040, 1041, |
| | | | | | 1042 |
| 656 | 100341053 | | | UNCLASSIFIED | 1022, 1042 |
| | (1505, 1506) | | | | |
| 657 | 100359369 | | | UNCLASSIFIED | 1000, 1006, 1013, |
| | (1515, 1516) | | | | 1017, 1022, 1024, |
| | | | | | 1030, 1040, 1041, |
| | | | | | 1042 |
| 658 | 100359375 | | | UNCLASSIFIED | 1022, 1040 |
| | (1517, 1518) | | | | |
| 659 | 100390549 | | | UNCLASSIFIED | 1022, 1026 |
| | (1523, 1524) | | | | |
| 660 | 100390556 | | | UNCLASSIFIED | 1012, 1022, 1030, |
| | (1525, 1526) | | | 1037, 1042 | |
| 661 | 101719456 | | | UNCLASSIFIED | 1000, 1011, 1013, |
| | (1553, 1554) | | | 1022, 1026, 1030, | |
| | | | | | 1040, 1041, 1042 |
| 662 | 87914096 | | | UNCLASSIFIED | 1022 |
| | (1559, 1560) | | | | |
| 663 | 87920624 | | | UNCLASSIFIED | 1022 |
| | (1561, 1562) | | | | |
| 664 | 87930000 | | | UNCLASSIFIED | 1022 |
| | (1569, 1570) | | | | |
| 665 | 87938912 | | | UNCLASSIFIED | 1022 |
| | (1585, 1586) | | | | |
| 666 | 87938916 | | | UNCLASSIFIED | 1022 |
| | (1587, 1588) | | | | |
| 667 | 87938995 | | | UNCLASSIFIED | 1022 |
| | (1593, 1594) | | | | |
| 668 | 87939464 | | | UNCLASSIFIED | 1022 |
| | (1595, 1596) | | | | |
| 669 | 87939583 | | | UNCLASSIFIED | 1022 |
| | (1599, 1600) | | | | |
| 670 | 87939655 | | | UNCLASSIFIED | 1022 |
| | (1603, 1604) | | | | |
| 671 | 100340702 | | | UNCLASSIFIED | 1022, 1042 |
| | (1609, 1610) | | | | |
| 672 | 100340735 | | | UNCLASSIFIED | 1022, 1040, 1041 |
| | (1611, 1612) | | | | |
| 673 | 100341592 | | | UNCLASSIFIED | 1022, 1030, 1040, |
| | (1625, 1626) | | | | 1042 |
| 674 | 100359468 | | | UNCLASSIFIED | 1020, 1022, 1026, |
| | (1633, 1634) | | | | 1040 |
| 675 | 100359472 | | | UNCLASSIFIED | 1010, 1014, 1022, |
| | (1635, 1636) | | | | 1024, 1030, 1040, |
| | | | | | 1042 |
| 676 | 100359646 | | | UNCLASSIFIED | 1006, 1022 |
| | (1643, 1644) | | | | |
| 677 | 100359684 | | | UNCLASSIFIED | 1011, 1022, 1030, |
| | (1647, 1648) | | | | 1033, 1040, 1042 |
| 678 | 100382961 | | | UNCLASSIFIED | 1022, 1042 |
| | (1649, 1650) | | | | |
| 679 | 100390802 | | | UNCLASSIFIED | 1014, 1022, 1025, |
| | (1651, 1652) | | | | 1026, 1030, 1040 |
| 680 | 100390826 | | | UNCLASSIFIED | 1022, 1030 |
| | (1657, 1658) | | | | |
| 681 | 100391660 | | | UNCLASSIFIED | 1006, 1022 |
| | (1661, 1662) | | | | |
| 682 | 100392269 | | | UNCLASSIFIED | 1000, 1002, 1010, |
| | (1665, 1666) | | | | 1013, 1020, 1022, |
| | | | | | 1024, 1025, 1030, |
| | | | | | 1033, 1040, 1041, |
| | | | | | 1042 |
| 683 | 101735606 | | | UNCLASSIFIED | 1022, 1041, 1042 |
| | (1685, 1686) | | | | |
| 684 | 101737119 | | | UNCLASSIFIED | 1014, 1022, 1026, |
| | (1689, 1690) | | | | 1030, 1039, 1040 |
| 685 | 87914585 | | | UNCLASSIFIED | 1022 |
| | (1693, 1694) | | | | |
| 686 | 87914593 | | | UNCLASSIFIED | 1022 |
| | (1695, 1696) | | | | |
| 687 | 87915183 | | | UNCLASSIFIED | 1022 |
| | (1703, 1704) | | | | |
| 688 | 87921874 | | | UNCLASSIFIED | 1022 |
| | (1709, 1710) | | | | |
| 689 | 87930501 | | | UNCLASSIFIED | 1022 |
| | (1721, 1722) | | | | |
| 690 | 87930672 | | | UNCLASSIFIED | 1022 |
| | (1723, 1724) | | | | |
| 691 | 87939827 | | | UNCLASSIFIED | 1022 |
| | (1725, 1726) | | | | |
| 692 | 87939859 | | | UNCLASSIFIED | 1022 |
| | (1727, 1728) | | | | |
| 693 | 100340944 | | | UNCLASSIFIED | 1022, 1042 |
| | (1735, 1736) | | | | |
| 694 | 100341793 | | | UNCLASSIFIED | 1022, 1023, 1026, |
| | (1749, 1750) | | | | 1030, 1039, 1040, |
| | | | | | 1042 |
| 695 | 100342525 | | | UNCLASSIFIED | 1022, 1040 |
| | (1753, 1754) | | | | |
| 696 | 100343051 | | | UNCLASSIFIED | 1022, 1040 |
| | (1757, 1758) | | | | |
| 697 | 100343063 | | | UNCLASSIFIED | 1011, 1022, 1024, |
| | (1759, 1760) | | | | 1025, 1026, 1033, |
| | | | | | 1040, 1042 |
| 698 | 100391801 | | | UNCLASSIFIED | 1008, 1013, 1022, |
| | (1773, 1774) | | | | 1025, 1030, 1041, |
| | | | | | 1042 |
| 699 | 100391812 | | | UNCLASSIFIED | 1014, 1022 |
| | (1775, 1776) | | | | |
| 700 | 100391877 | | | UNCLASSIFIED | 1022, 1030, 1040 |
| | (1781, 1782) | | | | |
| 701 | 100391903 | | | UNCLASSIFIED | 1013, 1022 |
| | (1783, 1784) | | | | |
| 702 | 100392675 | | | UNCLASSIFIED | 1000, 1011, 1014, |
| | (1787, 1788) | | | | 1017, 1022, 1025, |
| | | | | | 1026, 1030, 1033, |
| | | | | | 1040, 1041, 1042 |
| 703 | 100392731 | | | UNCLASSIFIED | 1006, 1022, 1040 |
| | (1789, 1790) | | | | |
| 704 | 100393298 | | | UNCLASSIFIED | 1004, 1011, 1012, |
| | (1793, 1794) | | | | 1022, 1024, 1026, |
| | | | | | 1027, 1033, 1040, |
| | | | | | 1041, 1042 |
| 705 | 87922906 | | | UNCLASSIFIED | 1022 |
| | (1833, 1834) | | | | |
| 706 | 87923610 | | | UNCLASSIFIED | 1022 |
| | (1835, 1836) | | | | |
| 707 | 87923633 | | | UNCLASSIFIED | 1022 |
| | (1837, 1838) | | | | |
| 708 | 87932254 | | | UNCLASSIFIED | 1022 |
| | (1849, 1850) | | | | |
| 709 | 87933044 | | | UNCLASSIFIED | 1022 |
| | (1851, 1852) | | | | |
| 710 | 87933054 | | | UNCLASSIFIED | 1022 |
| | (1853, 1854) | | | | |
| 711 | 87940134 | | | UNCLASSIFIED | 1022 |
| | (1855, 1856) | | | | |
| 712 | 87940138 | | | UNCLASSIFIED | 1022 |
| | (1857, 1858) | | | | |
| 713 | 100342813 | | | UNCLASSIFIED | 1006, 1007, 1011, |
| | (1875, 1876) | | | | 1012, 1014, 1022, |
| | | | | | 1024, 1030, 1033, |
| | | | | | 1039, 1040, 1041, |
| | | | | | 1042 |
| 714 | 100342853 | | | UNCLASSIFIED | 1011, 1012, 1013, |
| | (1879, 1880) | | | | 1022, 1024, 1025, |
| | | | | | 1026, 1030, 1042 |
| 715 | 100344075 | | | UNCLASSIFIED | 1022, 1040 |
| | (1887, 1888) | | | | |
| 716 | 100392740 | | | UNCLASSIFIED | 1000, 1013, 1022, |
| | (1895, 1896) | | | | 1030, 1040,1041, |
| | | | | | 1042 |
| 717 | 100392834 | | | UNCLASSIFIED | 1014, 1022, 1040 |
| | (1909, 1910) | | | | |
| 718 | 100392838 | | | UNCLASSIFIED | 1022, 1033 |
| | (1911, 1912) | | | | |
| 719 | 100395020 | | | UNCLASSIFIED | 1013, 1022, 1026, |
| | (1923, 1924) | | | | 1040 |
| 720 | 87914996 | | | UNCLASSIFIED | 1022 |
| | (1941, 1942) | | | | |
| 721 | 87915724 | | | UNCLASSIFIED | 1022 |
| | (1943, 1944) | | | | |
| 722 | 87915884 | | | UNCLASSIFIED | 1022 |
| | (1949, 1950) | | | | |
| 723 | 87916417 | | | UNCLASSIFIED | 1022 |
| | (1953, 1954) | | | | |
| 724 | 87917294 | | | UNCLASSIFIED | 1022 |
| | (1965, 1966) | | | | |
| 725 | 87918036 | | | UNCLASSIFIED | 1022 |
| | (1967, 1968) | | | | |
| 726 | 87941269 | | | UNCLASSIFIED | 1022 |
| | (1993, 1994) | | | | |
| 727 | 100344539 | | | UNCLASSIFIED | 1022, 1030, 1040 |
| | (2007, 2008) | | | | |
| 728 | 100396092 | | | UNCLASSIFIED | 1022, 1040 |
| | (2029, 2030) | | | | |
| 729 | 100396135 | | | UNCLASSIFIED | 1002, 1010, 1022, |
| | (2031, 2032) | | | | 1024, 1040 |
| 730 | 100416791 | | | UNCLASSIFIED | 1022, 1038 |
| | (2033, 2034) | | | | |
| 731 | 100417246 | | | UNCLASSIFIED | 1022, 1030, 1040 |
| | (2035, 2036) | | | | |
| 732 | 87916675 | | | UNCLASSIFIED | 1022 |
| | (2055, 2056) | | | | |
| 733 | 87917457 | | | UNCLASSIFIED | 1022 |
| | (2065, 2066) | | | | |
| 734 | 87918179 | | | UNCLASSIFIED | 1022 |
| | (2067, 2068) | | | | |
| 735 | 87926204 | | | UNCLASSIFIED | 1022 |
| | (2075, 2076) | | | | |
| 736 | 87942340 | | | UNCLASSIFIED | 1022 |
| | (2095, 2096) | | | | |
| 737 | 87942364 | | | UNCLASSIFiED | 1022 |
| | (2097, 2098) | | | | |
| 738 | 87919637 | | | UNCLASSIFIED | 1022 |
| | (1, 2) | | | | |
| 739 | 87929099 | | | UNCLASSIFIED | 1022 |
| | (3, 4) | | | | |
| 740 | 87937089 | | | UNCLASSIFIED | 1022 |
| | (33, 34) | | | | |
| 741 | 87942957 | | | UNCLASSIFIED | 1022 |
| | (57, 58) | | | | |
| 742 | 87942964 | | | UNCLASSIFIED | 1022 |
| | (59, 60) | | | | |
| 743 | 87926381 | | | UNCLASSIFIED | 1022 |
| | (73, 74) | | | | |
| 744 | 87941735 | | | UNCLASSIFIED | 1022 |
| | (103, 104) | | | | |
| 745 | 87941795 | | | UNCLASSIFIED | 1022 |
| | (107, 108) | | | | |
| 746 | 87942458 | | | UNCLASSIFIED | 1022 |
| | (117, 118) | | | | |
| 747 | 87942484 | | | UNCLASSIFIED | 1022 |
| | (123, 124) | | | | |
| 748 | 87919300 | | | UNCLASSIFIED | 1022 |
| | (135, 136) | | | | |
| 749 | 87928104 | | | UNCLASSIFIED | 1022 |
| | (137, 138) | | | | |
| 750 | 87933914 | | | UNCLASSIFIED | 1022 |
| | (139, 140) | | | | |
| 751 | 87936409 | | | UNCLASSIFIED | 1022 |
| | (173, 174) | | | | |
| 752 | 87936538 | | | UNCLASSIFIED | 1022 |
| | (177, 178) | | | | |
| 753 | 87937149 | | | UNCLASSIFIED | 1022 |
| | (183, 184) | | | | |
| 754 | 87937341 | | | UNCLASSIFIED | 1022 |
| | (187, 188) | | | | |
| 755 | 87938034 | | | UNCLASSIFIED | 1022 |
| | (189, 190) | | | | |
| 756 | 87938082 | | | UNCLASSIFIED | 1022 |
| | (191, 192) | | | | |
| 757 | 87938090 | | | UNCLASSIFIED | 1022 |
| | (193, 194) | | | | |
| 758 | 87937406 | | | UNCLASSIFIED | 1022 |
| | (199, 200) | | | | |
| 759 | 87937434 | | | UNCLASSIFIED | 1022 |
| | (201, 202) | | | | |
| 760 | 87938125 | | | UNCLASSIFIED | 1022 |
| | (221, 222) | | | | |
| 761 | 87938157 | | | UNCLASSIFIED | 1022 |
| | (231, 232) | | | | |
| 762 | 87938285 | | | UNCLASSIFIED | 1022 |
| | (237, 238) | | | | |
| 763 | 87920366 | | | UNCLASSIFIED | 1022 |
| | (251, 252) | | | | |
| 764 | 87920469 | | | UNCLASSIFIED | 1022 |
| | (253, 254) | | | | |
| 765 | 87936937 | | | UNCLASSIFIED | 1022 |
| | (259, 260) | | | | |
| 766 | 87937811 | | | UNCLASSIFIED | 1022 |
| | (273, 274) | | | | |
| 767 | 87937831 | | | UNCLASSIFIED | 1022 |
| | (275, 276) | | | | |
| 768 | 87937972 | | | UNCLASSIFIED | 1022 |
| | (283, 284) | | | | |
| 769 | 87938657 | | | UNCLASSIFIED | 1022 |
| | (305, 306) | | | | |
| 770 | 87938860 | | | UNCLASSIFIED | 1022 |
| | (341, 342) | | | | |
| 771 | 87938884 | | | UNCLASSIFIED | 1022 |
| | (343, 344) | | | | |
| 772 | 87939591 | | | UNCLASSIFIED | 1022 |
| | (349, 350) | | | | |
| 773 | 87939619 | | | UNCLASSIFIED | 1022 |
| | (351, 352) | | | | |
| 774 | 87939720 | | | UNCLASSIFIED | 1022 |
| | (363, 364) | | | | |
| 775 | 87939758 | | | UNCLASSIFIED | 1022 |
| | (367, 368) | | | | |
| 776 | 87931367 | | | UNCLASSIFIED | 1022 |
| | (387, 388) | | | | |
| 777 | 87940009 | | | UNCLASSIFIED | 1022 |
| | (393, 394) | | | | |
| 778 | 87940078 | | | UNCLASSIFIED | 1022 |
| | (403, 404) | | | | |
| 779 | 87916201 | | | UNCLASSIFIED | 1022 |
| | (405, 406) | | | | |
| 780 | 87940361 | | | UNCLASSIFIED | 1022 |
| | (453, 454) | | | | |
| 781 | 87940389 | | | UNCLASSIFIED | 1022 |
| | (455, 456) | | | | |
| 782 | 87941011 | | | UNCLASSIFIED | 1022 |
| | (459, 460) | | | | |
| 783 | 87917171 | | | UNCLASSIFIED | 1022 |
| | (485, 486) | | | | |
| 784 | 87917228 | | | UNCLASSIFIED | 1022 |
| | (489, 490) | | | | |
| 785 | 87933118 | | | UNCLASSIFIED | 1022 |
| | (497, 498) | | | | |
| 786 | 87933124 | | | UNCLASSIFIED | 1022 |
| | (499, 500) | | | | |
| 787 | 87940581 | | | UNCLASSIFIED | 1022 |
| | (539, 540) | | | | |
| 788 | 87941361 | | | UNCLASSIFIED | 1022 |
| | (557, 558) | | | | |
| 789 | 87918263 | | | UNCLASSIFIED | 1022 |
| | (579, 580) | | | | |
| 790 | 87934168 | | | UNCLASSIFIED | 1022 |
| | (595, 596) | | | | |
| 791 | 87934289 | | | UNCLASSIFIED | 1022 |
| | (605, 606) | | | | |
| 792 | 87941471 | | | UNCLASSIFIED | 1022 |
| | (633, 634) | | | | |
| 793 | 87942207 | | | UNCLASSIFIED | 1022 |
| | (651, 652) | | | | |
| 794 | 87943039 | | | UNCLASSIFIED | 1022 |
| | (671, 672) | | | | |
| 795 | 100401306 | | | UNCLASSIFIED | 1022, 1026, 1030, |
| | (687, 688) | | | | 1037, 1040, 1042 |
| 796 | 87918903 | | | UNCLASSIFIED | 1022 |
| | (691, 692) | | | | |
| 797 | 87918929 | | | UNCLASSIFIED | 1022 |
| | (693, 694) | | | | |
| 798 | 87927573 | | | UNCLASSIFIED | 1022 |
| | (695, 696) | | | | |
| 799 | 87928206 | | | UNCLASSIFIED | 1022 |
| | (697, 698) | | | | |
| 800 | 87918464 | | | UNCLASSIFIED | 1022 |
| | (705, 706) | | | | |
| 801 | 87933846 | | | UNCLASSIFIED | 1022 |
| | (709, 710) | | | | |
| 802 | 87941698 | | | UNCLASSIFIED | 1022 |
| | (713, 714) | | | | |
| 803 | 87917995 | | | UNCLASSIFIED | 1022 |
| | (715, 716) | | | | |
| 804 | 100347504 | | | UNCLASSIFIED | 1006, 1022 |
| | (721, 722) | | | | |
| 805 | 100389870 | | | UNCLASSIFIED | 1022, 1040 |
| | (725, 726) | | | | |
| 806 | 87937455 | | | UNCLASSIFIED | 1022 |
| | (739, 740) | | | | |
| 807 | 87938210 | | | UNCLASSIFIED | 1022 |
| | (741, 742) | | | | |
| 808 | 87938293 | | | UNCLASSIFIED | 1022 |
| | (743, 744) | | | | |
| 809 | 100348688 | | | UNCLASSIFIED | 1022 |
| | (747, 748) | | | | |
| 810 | 100340241 | | | UNCLASSIFIED | 1000, 1014, 1020, |
| | (757, 758) | | | | 1022, 1025, 1030, |
| | | | | | 1033, 1040, 1041, |
| | | | | | 1042 |
| 811 | 100359338 | | | UNCLASSIFIED | 1022, 1042 |
| | (773, 774) | | | | |
| 812 | 87920690 | | | UNCLASSIFIED | 1022 |
| | (779, 780) | | | | |
| 813 | 87920699 | | | UNCLASSIFIED | 1022 |
| | (781, 782) | | | | |
| 814 | 87921495 | | | UNCLASSIFIED | 1022 |
| | (783, 784) | | | | |
| 815 | 87930254 | | | UNCLASSIFIED | 1022 |
| | (787, 788) | | | | |
| 816 | 100340768 | | | UNCLASSIFIED | 1004, 1007, 1022, |
| | (791, 792) | | | | 1033, 1041, 1042 |
| 817 | 100359571 | | | UNCLASSIFIED | 1012, 1022 |
| | (795, 796) | | | | |
| 818 | 100382906 | | | UNCLASSIFIED | 1022, 1024, 1040 |
| | (797, 798) | | | | |
| 819 | 87930415 | | | UNCLASSIFIED | 1022 |
| | (805, 806) | | | | |
| 820 | 100340946 | | | UNCLASSIFIED | 1014, 1022 |
| | (807, 808) | | | | |
| 821 | 100341664 | | | UNCLASSIFIED | 1022, 1040 |
| | (809, 810) | | | | |
| 822 | 100393201 | | | UNCLASSIFIED | 1022, 1042 |
| | (815, 816) | | | | |
| 823 | 100393407 | | | UNCLASSIFIED | 1022, 1030 |
| | (821, 822) | | | | |
| 824 | 87916613 | | | UNCLASSIFIED | 1022 |
| | (835, 836) | | | | |
| 825 | 87923857 | | | UNCLASSIFIED | 1022 |
| | (837, 838) | | | | |
| 826 | 87941343 | | | UNCLASSIFIED | 1022 |
| | (845, 846) | | | | |
| 827 | 100345247 | | | UNCLASSIFIED | 1021, 1022, 1042 |
| | (849, 850) | | | | |
| 828 | 100394534 | | | UNCLASSIFIED | 1012, 1022, 1026, |
| | (851, 852) | | | | 1030, 1034, 1040, |
| | | | | | 1041, 1042 |
| 829 | 87925585 | | | UNCLASSIFIED | 1022 |
| | (859, 860) | | | | |
| 830 | 87940873 | | | UNCLASSIFIED | 1022 |
| | (865, 866) | | | | |
| 831 | 87941639 | | | UNCLASSIFIED | 1022 |
| | (871, 872) | | | | |
| 832 | 100338537 | | | UNCLASSIFIED | 1022, 1026, 1042 |
| | (873, 874) | | | | |
| 833 | 100338593 | | | UNCLASSIFIED | 1013, 1022 |
| | (875, 876) | | | | |
| 834 | 100339211 | | | UNCLASSIFIED | 1022, 1040, 1042 |
| | (883, 884) | | | | |
| 835 | 100339213 | | | UNCLASSIFIED | 1022, 1030, 1040, |
| | (885, 886) | | | | 1042 |
| 836 | 100347113 | | | UNCLASSIFIED | 1000, 1003, 1012, |
| | (887, 888) | | | | 1013, 1018, 1022, |
| | | | | | 1024, 1026, 1030, |
| | | | | | 1034, 1040, 1042 |
| 837 | 100387853 | | | UNCLASSIFIED | 1009, 1010, 1012, |
| | (895, 896) | | | | 1013, 1022, 1024, |
| | | | | | 1030, 1033, 1036, |
| | | | | | 1040, 1042 |
| 838 | 100396799 | | | UNCLASSIFIED | 1022, 1030 |
| | (899, 900) | | | | |
| 839 | 100398126 | | | UNCLASSIFIED | 1022, 1026, 1042 |
| | (911, 912) | | | | |
| 840 | 100400598 | | | UNCLASSIFIED | 1009, 1022, 1024, |
| | (915, 916) | | | | 1040 |
| 841 | 100400634 | | | UNCLASSIFIED | 1022, 1040 |
| | (919, 920) | | | | |
| 842 | 100401274 | | | UNCLASSIFIED | 1013, 1022, 1030, |
| | (925, 926) | | | | 1040 |
| 843 | 100402058 | | | UNCLASSIFIED | 1022, 1026, 1042 |
| | (933, 934) | | | | |
| 844 | 101721920 | | | UNCLASSIFIED | 1011, 1012, 1013, |
| | (945, 946) | | | | 1014, 1022, 1025, |
| | | | | | 1026, 1041 |
| 845 | 87919589 | | | UNCLASSIFIED | 1022 |
| | (949, 950) | | | | |
| 846 | 87927431 | | | UNCLASSIFIED | 1022 |
| | (957, 958) | | | | |
| 847 | 87927612 | | | UNCLASSIFIED | 1022 |
| | (959, 960) | | | | |
| 848 | 87927694 | | | UNCLASSIFIED | 1022 |
| | (961, 962) | | | | |
| 849 | 87934770 | | | UNCLASSIFIED | 1022 |
| | (971, 972) | | | | |
| 850 | 87935484 | | | UNCLASSIFIED | 1022 |
| | (983, 984) | | | | |
| 851 | 87935539 | | | UNCLASSIFIED | 1022 |
| | (985, 986) | | | | |
| 852 | 87936197 | | | UNCLASSIFIED | 1022 |
| | (991, 992) | | | | |
| 853 | 87936359 | | | UNCLASSIFIED | 1022 |
| | (997, 998) | | | | |
| 854 | 87936381 | | | UNCLASSIFIED | 1022 |
| | (999, 1000) | | | | |
| 855 | 87937033 | | | UNCLASSIFIED | 1022 |
| | (1003, 1004) | | | | |
| 856 | 100387474 | | | UNCLASSIFIED | 1022, 1030, 1042 |
| | (1015, 1016) | | | | |
| 857 | 100387688 | | | UNCLASSIFIED | 1022, 1030, 1037, |
| | (1021, 1022) | | | | 1041, 1042 |
| 858 | 100395501 | | | UNCLASSIFIED | 1004, 1013, 1014, |
| | (1035, 1036) | | | | 1017, 1022, 1025, |
| | | | | | 1026, 1040, 1042 |
| 859 | 100416939 | | | UNCLASSIFIED | 1006, 1012, 1022, |
| | (1059, 1060) | | | | 1026, 1027, 1028, |
| | | | | | 1030, 1040, 1042 |
| 860 | 100416987 | | | UNCLASSIFIED | 1000, 1012, 1022, |
| | (1061, 1062) | | | | 1026, 1036, 1040, |
| | | | | | 1042 |
| 861 | 101722123 | | | UNCLASSIFIED | 1012, 1022, 1033 |
| | (1073, 1074) | | | | |
| 862 | 101731037 | | | UNCLASSIFIED | 1012, 1022, 1025, |
| | (1075, 1076) | | | | 1026, 1040, 1041, |
| | | | | | 1042 |
| 863 | 87918385 | | | UNCLASSIFIED | 1022 |
| | (1085, 1086) | | | | |
| 864 | 87918480 | | | UNCLASSIFIED | 1022 |
| | (1087, 1088) | | | | |
| 865 | 87928006 | | | UNCLASSIFIED | 1022 |
| | (1093, 1094) | | | | |
| 866 | 87932943 | | | UNCLASSIFIED | 1022 |
| | (1095, 1096) | | | | |
| 867 | 87933872 | | | UNCLASSIFIED | 1022 |
| | (1099, 1100) | | | | |
| 868 | 87934445 | | | UNCLASSIFIED | 1022 |
| | (1103, 1104) | | | | |
| 869 | 87934537 | | | UNCLASSIFIED | 1022 |
| | (1105, 1106) | | | | |
| 870 | 87934593 | | | UNCLASSIFIED | 1022 |
| | (1107, 1108) | | | | |
| 871 | 87941815 | | | UNCLASSIFIED | 1022 |
| | (1115, 1116) | | | | |
| 872 | 87942552 | | | UNCLASSIFIED | 1022 |
| | (1123, 1124) | | | | |
| 873 | 100347089 | | | UNCLASSIFIED | 1013, 1022, 1030, |
| | (1129, 1130) | | | | 1040 |
| 874 | 100354322 | | | UNCLASSIFIED | 1006, 1022 |
| | (1131, 1132) | | | | |
| 875 | 100387744 | | | UNCLASSIFIED | 1022, 1040, 1041 |
| | (1133, 1134) | | | | |
| 876 | 100388450 | | | UNCLASSIFIED | 1012, 1022, 1026, |
| | (1135, 1136) | | | | 1040, 1042 |
| 877 | 100389165 | | | UNCLASSIFIED | 1022, 1042 |
| | (1137, 1138) | | | | |
| 878 | 100400455 | | | UNCLASSIFIED | 1014, 1022, 1040 |
| | (1143, 1144) | | | | |
| 879 | 101318009 | | | UNCLASSIFIED | 1022, 1040 |
| | (1155, 1156) | | | | |
| 880 | 87918605 | | | UNCLASSIFIED | 1022 |
| | (1161, 1162) | | | | |
| 881 | 87936111 | | | UNCLASSIFIED | 1022 |
| | (1171, 1172) | | | | |
| 882 | 87941999 | | | UNCLASSIFIED | 1022 |
| | (1179, 1180) | | | | |
| 883 | 100347519 | | | UNCLASSIFIED | 1022, 1024, 1025, |
| | (1189, 1190) | | | | 1040, 1042 |
| 884 | 100347526 | | | UNCLASSIFIED | 1022, 1040, 1042 |
| | (1191, 1192) | | | | |
| 885 | 100398239 | | | UNCLASSIFIED | 1022 |
| | (1205, 1206) | | | | |
| 886 | 100398347 | | | UNCLASSIFIED | 1022, 1040 |
| | (1209, 1210) | | | | |
| 887 | 100400873 | | | UNCLASSIFIED | 1000, 1022, 1037 |
| | (1225, 1226) | | | | |
| 888 | 100400894 | | | UNCLASSIFIED | 1022, 1026 |
| | (1227, 1228) | | | | |
| 889 | 100401537 | | | UNCLASSIFIED | 1006, 1009, 1010, |
| | (1235, 1236) | | | | 1011, 1014, 1017, |
| | | | | | 1022, 1025, 1026, |
| | | | | | 1030, 1033, 1040, |
| | | | | | 1041, 1042 |
| 890 | 100401553 | | | UNCLASSIFIED | 1013, 1022, 1024, |
| | (1237, 1238) | | | | 1030, 1039, 1040, |
| | | | | | 1042 |
| 891 | 100401613 | | | UNCLASSIFIED | 1011, 1022, 1030, |
| | (1241, 1242) | | | | 1040 |
| 892 | 100401637 | | | UNCLASSIFIED | 1022, 1042 |
| | (1245, 1246) | | | | |
| 893 | 100402189 | | | UNCLASSIFIED | 1022, 1041 |
| | (1247, 1248) | | | | |
| 894 | 100402236 | | | UNCLASSIFIED | 1022, 1040, 1042 |
| | (1249, 1250) | | | | |
| 895 | 100403076 | | | UNCLASSIFIED | 1022, 1030 |
| | (1265, 1266) | | | | |
| 896 | 101319342 | | | UNCLASSIFIED | 1022, 1040, 1042 |
| | (1269, 1270) | | | | |
| 897 | 101716226 | | | UNCLASSIFIED | 1022, 1026 |
| | (1271, 1272) | | | | |
| 898 | 87919777 | | | | |
| | (1275, 1276) | | | UNCLASSIFIED | 1022 |
| 899 | 87927902 | | | UNCLASSIFIED | 1022 |
| | (1277, 1278) | | | | |
| 900 | 87937241 | | | UNCLASSIFIED | 1022 |
| | (1291, 1292) | | | | |
| 901 | 87938074 | | | UNCLASSIFIED | 1022 |
| | (1295, 1296) | | | | |
| 902 | 100347696 | | | UNCLASSIFIED | 1022, 1040, 1042 |
| | (1297, 1298) | | | | |
| 903 | 100397832 | | | UNCLASSIFIED | 1022, 1042 |
| | (1303, 1304) | | | | |
| 904 | 100401714 | | | UNCLASSIFIED | 1022, 1039, 1042 |
| | (1307, 1308) | | | | |
| 905 | 100401805 | | | UNCLASSIFIED | 1001, 1004, 1011, |
| | (1311, 1312) | | | | 1013, 1022, 1040, |
| | | | | | 1042 |
| 906 | 100401856 | | | UNCLASSIFIED | 1010, 1022 |
| | (1313, 1314) | | | | |
| 907 | 100402462 | | | UNCLASSIFIED | 1022, 1033 |
| | (1321, 1322) | | | | |
| 908 | 100402469 | | | UNCLASSIFIED | 1000, 1012, 1022, |
| | (1323, 1324) | | | | 1040 |
| 909 | 100402673 | | | UNCLASSIFIED | 1022, 1040, 1042 |
| | (1329, 1330) | | | | |
| 910 | 100403210 | | | UNCLASSIFIED | 1022, 1040 |
| | (1331, 1332) | | | | |
| 911 | 100403275 | | | UNCLASSIFIED | 1022, 1025 |
| | (1337, 1338) | | | | |
| 912 | 101709136 | | | UNCLASSIFIED | 1000, 1006, 1013, |
| | (1345, 1346) | | | | 1022, 1024, 1033, |
| | | | | | 1042 |
| 913 | 101709297 | | | UNCLASSIFIED | 1022, 1024, 1042 |
| | (1347, 1348) | | | | |
| 914 | 87920252 | | | UNCLASSIFIED | 1022 |
| | (1351, 1352) | | | | |
| 915 | 87928889 | | | UNCLASSIFIED | 1022 |
| | (1353, 1354) | | | | |
| 916 | 87938263 | | | UNCLASSIFIED | 1022 |
| | (1357, 1358) | | | | |
| 917 | 87938289 | | | UNCLASSIFIED | 1022 |
| | (1359, 1360) | | | | |
| 918 | 87939033 | | | UNCLASSIFIED | 1022 |
| | (1363, 1364) | | | | |
| 919 | 100349508 | | | UNCLASSIFIED | 1022, 1040, 1042 |
| | (1371, 1372) | | | | |
| 920 | 100356774 | | | UNCLASSIFIED | 1022, 1042 |
| | (1373, 1374) | | | | |
| 921 | 100356844 | | | UNCLASSIFIED | 1011, 1021, 1022, |
| | (1379, 1380) | | | | 1024, 1026, 1030, |
| | | | | | 1033, 1039, 1040, |
| | | | | | 1042 |
| 922 | 100356855 | | | UNCLASSIFIED | 1010, 1012, 1022, |
| | (1381, 1382) | | | | 1024, 1033, 1042 |
| 923 | 100390253 | | | UNCLASSIFIED | 1000, 1021, 1022, |
| | (1383, 1384) | | | | 1042 |
| 924 | 100402720 | | | UNCLASSIFIED | 1009, 1014, 1022, |
| | (1393, 1394) | | | | 1024, 1030, 1042 |
| 925 | 100402748 | | | UNCLASSIFIED | 1011, 1013, 1014, |
| | (1395, 1396) | | | | 1022, 1030, 1040, |
| | | | | | 1042 |
| 926 | 100402774 | | | UNCLASSIFIED | 1022, 1042 |
| | (1399, 1400) | | | | |
| 927 | 100402847 | | | UNCLASSIFIED | 1000, 1006, 1013, |
| | (1405, 1406) | | | | 1014, 1022, 1024, |
| | | | | | 1030, 1033, 1041, |
| | | | | | 1042 |
| 928 | 100402894 | | | UNCLASSIFIED | 1012, 1022, 1036, |
| | (1407, 1408) | | | | 1040, 1042 |
| 929 | 100402971 | | | UNCLASSIFIED | 1022, 1024, 1030, |
| | (1411, 1412) | | | | 1033, 1040, 1042 |
| 930 | 100402999 | | | UNCLASSIFIED | 1006, 1022, 1030, |
| | (1413, 1414) | | | | 1042 |
| 931 | 87920282 | | | UNCLASSIFIED | 1022 |
| | (1423, 1424) | | | | |
| 932 | 87920413 | | | UNCLASSIFIED | 1022 |
| | (1429, 1430) | | | | |
| 933 | 87920497 | | | UNCLASSIFIED | 1022 |
| | (1437, 1438) | | | | |
| 934 | 87921112 | | | UNCLASSIFIED | 1022 |
| | (1445, 1446) | | | | |
| 935 | 87921185 | | | UNCLASSIFIED | 1022 |
| | (1447, 1448) | | | | |
| 936 | 87937956 | | | UNCLASSIFIED | 1022 |
| | (1459, 1460) | | | | |
| 937 | 87938583 | | | UNCLASSIFIED | 1022 |
| | (1469, 1470) | | | | |
| 938 | 87939158 | | | UNCLASSIFIED | 1022 |
| | (1475, 1476) | | | | |
| 939 | 87939187 | | | UNCLASSIFIED | 1022 |
| | (1477, 1478) | | | | |
| 940 | 100340372 | | | UNCLASSIFIED | 1022, 1024, 1036, |
| | (1491, 1492) | | | | 1040, 1042 |
| 941 | 100340389 | | | UNCLASSIFIED | 1000, 1010, 1014, |
| | (1493, 1494) | | | | 1022, 1026, 1030, |
| | | | | | 1033, 1042 |
| 942 | 100341019 | | | UNCLASSIFIED | 1022, 1040 |
| | (1501, 1502) | | | | |
| 943 | 100341111 | | | UNCLASSIFIED | 1022, 1040 |
| | (1509, 1510) | | | | |
| 944 | 100341135 | | | UNCLASSIFIED | 1013, 1022, 1042 |
| | (1511, 1512) | | | | |
| 945 | 100359413 | | | UNCLASSIFIED | 1004, 1017, 1022, |
| | (1519, 1520) | | | | 1024, 1026, 1033, |
| | | | | | 1040, 1041, 1042 |
| 946 | 100359422 | | | UNCLASSIFIED | 1011, 1022, 1024, |
| | (1521, 1522) | | | | 1030, 1037, 1040, |
| | | | | | 1041, 1042 |
| 947 | 100390764 | | | UNCLASSIFIED | 1007, 1022 |
| | (1531, 1532) | | | | |
| 948 | 100392143 | | | UNCLASSIFIED | 1022, 1030 |
| | (1537, 1538) | | | | |
| 949 | 100392162 | | | UNCLASSIFIED | 1022, 1024, 1027, |
| | (1543, 1544) | | | | 1030, 1042 |
| 950 | 100392190 | | | UNCLASSIFIED | 1022, 1025 |
| | (1545, 1546) | | | | |
| 951 | 101719310 | | | UNCLASSIFIED | 1022, 1033, 1037 |
| | (1551, 1552) | | | | |
| 952 | 101734615 | | | UNCLASSIFIED | 1022, 1024, 1041 |
| | (1555, 1556) | | | | |
| 953 | 101735311 | | | UNCLASSIFIED | 1013, 1017, 1022, |
| | (1557, 1558) | | | | 1042 |
| 954 | 87920936 | | | UNCLASSIFIED | 1022 |
| | (1563, 1564) | | | | |
| 955 | 87921414 | | | UNCLASSIFIED | 1022 |
| | (1565, 1566) | | | | |
| 956 | 87930287 | | | UNCLASSIFIED | 1022 |
| | (1571, 1572) | | | | |
| 957 | 87930379 | | | UNCLASSIFIED | 1022 |
| | (1573, 1574) | | | | |
| 958 | 87938823 | | | UNCLASSIFIED | 1022 |
| | (1579, 1580) | | | | |
| 959 | 87938973 | | | UNCLASSIFIED | 1022 |
| | (1589, 1590) | | | | |
| 960 | 87938987 | | | UNCLASSIFIED | 1022 |
| | (1591, 1592) | | | | |
| 961 | 87939563 | | | UNCLASSIFIED | 1022 |
| | (1597, 1598) | | | | |
| 962 | 87939762 | | | UNCLASSIFIED | 1022 |
| | (1605, 1606) | | | | |
| 963 | 100340633 | | | UNCLASSIFIED | 1022, 1040, 1042 |
| | (1607, 1608) | | | | |
| 964 | 100340803 | | | UNCLASSIFIED | 1000, 1003, 1022, |
| | (1617, 1618) | | | | 1026, 1042 |
| 965 | 100340824 | | | UNCLASSIFIED | 1011, 1013, 1022, |
| | (1621, 1622) | | | | 1024, 1030, 1040, |
| | | | | | 1041, 1042 |
| 966 | 100359507 | | | UNCLASSIFIED | 1004, 1012, 1022, |
| | (1637, 1638) | | | | 1030, 1040, 1041 |
| 967 | 100390818 | | | UNCLASSIFIED | 1013, 1022, 1040, |
| | (1653, 1654) | | | | 1042 |
| 968 | 100390821 | | | UNCLASSIFIED | 1002, 1009, 1010, |
| | (1655, 1656) | | | | 1011, 1012, 1013, |
| | | | | | 1022, 1024, 1025, |
| | | | | | 1040, 1041, 1042 |
| 969 | 100391596 | | | UNCLASSIFIED | 1022, 1025, 1040 |
| | (1659, 1660) | | | | |
| 970 | 100393152 | | | UNCLASSIFIED | 1007, 1011, 1013, |
| | (1681, 1682) | | | | 1014, 1022, 1030, |
| | | | | | 1033, 1040, 1042 |
| 971 | 101737118 | | | UNCLASSIFIED | 1022, 1042 |
| | (1687, 1688) | | | | |
| 972 | 87914420 | | | UNCLASSIFIED | 1022 |
| | (1691, 1692) | | | | |
| 973 | 87914638 | | | UNCLASSIFIED | 1022 |
| | (1697, 1698) | | | | |
| 974 | 87914680 | | | UNCLASSIFIED | 1022 |
| | (1701, 1702) | | | | |
| 975 | 87915378 | | | UNCLASSIFIED | 1022 |
| | (1705, 1706) | | | | |
| 976 | 87921701 | | | UNCLASSIFIED | 1022 |
| | (1707, 1708) | | | | |
| 977 | 87921900 | | | UNCLASSIFIED | 1022 |
| | (1711, 1712) | | | | |
| 978 | 87923155 | | | UNCLASSIFIED | 1022 |
| | (1713, 1714) | | | | |
| 979 | 87924018 | | | UNCLASSIFIED | 1022 |
| | (1715, 1716) | | | | |
| 980 | 87939937 | | | UNCLASSIFIED | 1022 |
| | (1729, 1730) | | | | |
| 981 | 87939969 | | | UNCLASSIFIED | 1022 |
| | (1731, 1732) | | | | |
| 982 | 87940053 | | | UNCLASSIFIED | 1022 |
| | (1733, 1734) | | | | |
| 983 | 100340959 | | | UNCLASSIFIED | 1000, 1012, 1013, |
| | (1737, 1738) | | | | 1022, 1024, 1030, |
| | | | | | 1041, 1042 |
| 984 | 100340997 | | | UNCLASSIFIED | 1022, 1024, 1030, |
| | (1739, 1740) | | | | 1033, 1040, 1042 |
| 985 | 100341759 | | | UNCLASSIFIED | 1006, 1010, 1011, |
| | (1745, 1746) | | | | 1022, 1024, 1030, |
| | | | | | 1033, 1041, 1042 |
| 986 | 100342404 | | | UNCLASSIFIED | 1014, 1022, 1040, |
| | (1751, 1752) | | | | 1042 |
| 987 | 100343050 | | | UNCLASSIFIED | 1009, 1010, 1022, |
| | (1755, 1756) | | | | 1030, 1033, 1039, |
| | | | | | 1040, 1041, 1042 |
| 988 | 100375857 | | | UNCLASSIFIED | 1000, 1001, 1012, |
| | (1767, 1768) | | | | 1013, 1022, 1024, |
| | | | | | 1025, 1026, 1030, |
| | | | | | 1033, 1037, 1039, |
| | | | | | 1040, 1041, 1042 |
| 989 | 100391816 | | | UNCLASSIFIED | 1022, 1041 |
| | (1777, 1778) | | | | |
| 990 | 100391869 | | | UNCLASSIFIED | 1014, 1022, 1042 |
| | (1779, 1780) | | | | |
| 991 | 100392623 | | | UNCLASSIFIED | 1013, 1022 |
| | (1785, 1786) | | | | |
| 992 | 100393239 | | | UNCLASSIFIED | 1000, 1012, 1022, |
| | (1791, 1792) | | | | 1042 |
| 993 | 100393301 | | | UNCLASSIFIED | 1006, 1022, 1040 |
| | (1795, 1796) | | | | |
| 994 | 100393306 | | | UNCLASSIFIED | 1022, 1026 |
| | (1797, 1798) | | | | |
| 995 | 100393332 | | | UNCLASSIFIED | 1022, 1040, 1042 |
| | (1799, 1800) | | | | |
| 996 | 100393380 | | | UNCLASSIFIED | 1022, 1040 |
| | (1801, 1802) | | | | |
| 997 | 101736752 | | | UNCLASSIFIED | 1022, 1041 |
| | (1809, 1810) | | | | |
| 998 | 87914846 | | | UNCLASSIFIED | 1022 |
| | (1813, 1814) | | | | |
| 999 | 87914851 | | | UNCLASSIFIED | 1022 |
| | (1815, 1816) | | | | |
| 1000 | 87914904 | | | UNCLASSIFIED | 1022 |
| | (1817, 1818) | | | | |
| 1001 | 87915536 | | | UNCLASSIFIED | 1022 |
| | (1819, 1820) | | | | |
| 1002 | 87916269 | | | UNCLASSIFIED | 1022 |
| | (1821, 1822) | | | | |
| 1003 | 87917021 | | | UNCLASSIFIED | 1022 |
| | (1827, 1828) | | | | |
| 1004 | 87917073 | | | UNCLASSIFIED | 1022 |
| | (1829, 1830) | | | | |
| 1005 | 87922734 | | | UNCLASSIFIED | 1022 |
| | (1831, 1832) | | | | |
| 1006 | 87930714 | | | UNCLASSIFIED | 1022 |
| | (1841, 1842) | | | | |
| 1007 | 87930889 | | | UNCLASSIFIED | 1022 |
| | (1845, 1846) | | | | |
| 1008 | 87932229 | | | UNCLASSIFIED | 1022 |
| | (1847, 1848) | | | | |
| 1009 | 87940193 | | | UNCLASSIFIED | 1022 |
| | (1859, 1860) | | | | |
| 1010 | 87940329 | | | UNCLASSIFIED | 1022 |
| | (1863, 1864) | | | | |
| 1011 | 100342881 | | | UNCLASSIFIED | 1022, 1030 |
| | (1881, 1882) | | | | |
| 1012 | 100343515 | | | UNCLASSIFIED | 1012, 1014, 1022, |
| | (1883, 1884) | | | | 1025, 1028, 1037, |
| | | | | | 1042 |
| 1013 | 100392791 | | | UNCLASSIFIED | 1022, 1040 |
| | (1899, 1900) | | | | |
| 1014 | 100392798 | | | UNCLASSIFIED | 1022, 1033, 1041, |
| | (1901, 1902) | | | | 1042 |
| 1015 | 100392829 | | | UNCLASSIFIED | 1022, 1026, 1042 |
| | (1907, 1908) | | | | |
| 1016 | 100393685 | | | UNCLASSIFIED | 1004, 1022 |
| | (1917, 1918) | | | | |
| 1017 | 100417007 | | | UNCLASSIFIED | 1022, 1041 |
| | (1925, 1926) | | | | |
| 1018 | 100417055 | | | UNCLASSIFIED | 1022, 1040, 1042 |
| | (1931, 1932) | | | | |
| 1019 | 100417158 | | | UNCLASSIFIED | 1000, 1022, 1025 |
| | (1937, 1938) | | | | |
| 1020 | 87915728 | | | UNCLASSIFIED | 1022 |
| | (1945, 1946) | | | | |
| 1021 | 87916410 | | | UNCLASSIFIED | 1022 |
| | (1951, 1952) | | | | |
| 1022 | 87916496 | | | UNCLASSIFIED | 1022 |
| | (1955, 1956) | | | | |
| 1023 | 87917201 | | | UNCLASSIFIED | 1022 |
| | (1961, 1962) | | | | |
| 1024 | 87917244 | | | UNCLASSIFIED | 1022 |
| | (1963, 1964) | | | | |
| 1025 | 87923761 | | | UNCLASSIFIED | 1022 |
| | (1969, 1970) | | | | |
| 1026 | 87932431 | | | UNCLASSIFIED | 1022 |
| | (1971, 1972) | | | | |
| 1027 | 87932455 | | | UNCLASSIFIED | 1022 |
| | (1973, 1974) | | | | |
| 1028 | 87933273 | | | UNCLASSIFIED | 1022 |
| | (1977, 1978) | | | | |
| 1029 | 87940471 | | | UNCLASSIFIED | 1022 |
| | (1983, 1984) | | | | |
| 1030 | 87940503 | | | UNCLASSIFIED | 1022 |
| | (1985, 1986) | | | | |
| 1031 | 87941180 | | | UNCLASSIFIED | 1022 |
| | (1989, 1990) | | | | |
| 1032 | 87941261 | | | UNCLASSIFIED | 1022 |
| | (1991, 1992) | | | | |
| 1033 | 100344355 | | | UNCLASSIFIED | 1003, 1022 |
| | (2003, 2004) | | | | |
| 1034 | 100345228 | | | UNCLASSIFIED | 1022, 1042 |
| | (2009, 2010) | | | | |
| 1035 | 100345238 | | | UNCLASSIFIED | 1022, 1040 |
| | (2011,2012) | | | | |
| 1036 | 100378526 | | | UNCLASSIFIED | 1011, 1020, 1022, |
| | (2013, 2014) | | | | 1024, 1035, 1040, |
| | | | | | 1042 |
| 1037 | 100394523 | | | UNCLASSIFIED | 1010, 1022, 1025, |
| | (2019, 2020) | | | | 1030, 1040 |
| 1038 | 100395195 | | | UNCLASSIFIED | 1022, 1024 |
| | (2023, 2024) | | | | |
| 1039 | 100417463 | | | UNCLASSIFIED | 1022, 1030, 1040 |
| | (2045, 2046) | | | | |
| 1040 | 100417472 | | | UNCLASSIFIED | 1002, 1013, 1014, |
| | (2047, 2048) | | | | 1016, 1022, 1025, |
| | | | | | 1027, 1030, 1038, |
| | | | | | 1040, 1041, 1042 |
| 1041 | 87916721 | | | UNCLASSIFIED | 1022 |
| | (2057, 2058) | | | | |
| 1042 | 87918214 | | | UNCLASSIFIED | 1022 |
| | (2069, 2070) | | | | |
| 1043 | 87925540 | | | UNCLASSIFIED | 1022 |
| | (2073, 2074) | | | | |
| 1044 | 87926328 | | | UNCLASSIFIED | 1022 |
| | (2077, 2078) | | | | |
| 1045 | 87933549 | | | UNCLASSIFIED | 1022 |
| | (2081, 2082) | | | | |
| 1046 | 87940743 | | | UNCLASSIFIED | 1022 |
| | (2085, 2086) | | | | |
| 1047 | 87940772 | | | UNCLASSIFIED | 1022 |
| | (2087, 2088) | | | | |
| 1048 | 87940786 | | | UNCLASSIFIED | 1022 |
| | (2089, 2090) | | | | |
| 1049 | 87942320 | | | UNCLASSIFIED | 1022 |
| | (2093, 2094) | | | | |
| 1050 | 87942368 | | | UNCLASSIFIED | 1022 |
| | (2099, 2100) | | | | |
| 1051 | 87943047 | | | UNCLASSIFIED | 1022 |
| | (2101, 2102) | | | | |

[0046] Table 2 provides generally a correspondence between tissues and diseases or pathologies related to the tissue. Column 1 of Table 2, entitled “tissue id”, provides the tissue identification number used in Column 6 of Table I . The tissue id number runs serially from 1000 to 1042. Column 2 of Table 2, entitled “tissue hierarchy”, identifies the tissue and a larger tissue or organ system identified by the identification number of Column 1. Column 3 of Table 2, entitled “Common conditions/diseases”, and Column 4 of Table 2, entitled “Other diseases”, provide respectively a group of principal diseases, pathologies or conditions, and a group of additional diseases, pathologies or conditions, related to the tissue named in Column 2.

TABLE 2

| tissue id | tissue hierarchy | Common conditions/diseases | Other diseases |
|---|---|---|---|
| 1000 | Cardiovascular | cancer, trauma, regeneration (in | Cardiomyopathy, Atherosclerosis, |
| | System/Heart | vitro and in vivo), viral/bacterial/ | Hypertension, Congenital heart defects, |
| | | parasitic infections | Aortic stenosis, Atrial septal defect |
| | | | (ASD), Atrioventricular (A-V) canal |
| | | | defect, Ductus arteriosus, Pulmonary |
| | | | stenosis, Subaortic stenosis, Ventricular |
| | | | septal defect (VSD), valve diseases, |
| | | | Tuberous sclerosis, Scleroderma, |
| | | | Obesity, Transplantation |
| 1001 | Cardiovascular | cancer, trauma, regeneration (in | Cardiomyopathy, Atherosclerosis, |
| | System/Heart/ | vitro and in vivo), viral/bacterial/ | Hypertension, Congenital heart defects, |
| | Aorta | parasitic infections | Aortic stenosis, Atrial septal defect |
| | | | (ASD), Atrioventricular (A-V) canal |
| | | | defect, Ductus arteriosus, Pulmonary |
| | | | stenosis, Subaortic stenosis, Ventricular |
| | | | septal defect (VSD), valve diseases, |
| | | | Tuberous sclerosis, Scleroderma, |
| | | | Obesity, Transplantation |
| 1002 | Cardiovascular | cancer, trauma, regeneration (in | Anemia, Bleeding disorders, |
| | System/Vein/ | vitro and in vivo), viral/bacterial/ | Scleroderma, Transplantation |
| | Umbilical Vein | parasitic infections | |
| 1003 | Endocrine System/ | cancer, trauma, regeneration (in | Adrenoleukodystrophy, Congenital |
| | Adrenal Gland/ | vitro and in vivo), viral/bacterial/ | Adrenal Hyperplasia, |
| | Suprarenal gland | parasitic infections | |
| 1004 | Endocrine System/ | cancer, trauma, regeneration (in | Diabetes, Von Hippel-Lindau (VHL) |
| | Pancreas | vitro and in vivo), viral/bacterial/ | syndrome, Pancreatitis, Obesity |
| | | parasitic infections | |
| 1005 | Endocrine System/ | cancer, trauma, regeneration (in | Diabetes, Von Hippel-Lindau (VHL) |
| | Pancreas/Islets of | vitro and in vivo), viral/bacterial/ | syndrome, Pancreatitis, Obesity |
| | Langerhans | parasitic infections | |
| 1006 | Endocrine System/ | cancer, trauma, regeneration (in | Hyperparathyroidism, |
| | Parathyroid Gland | vitro and in vivo), viral/bacterial/ | Hypoparathyroidism |
| | | parasitic infections | |
| 1007 | Endocrine System/ | cancer, trauma, regeneration (in | SIDS |
| | Pineal Gland | vitro and in vivo), viral/bacterial/ | |
| | | parasitic infections | |
| 1008 | Endocrine System/ | cancer, trauma, regeneration (in | Hyperthyroidism and Hypothyroidism |
| | Thyroid | vitro and in vivo), viral/bacterial/ | |
| | | parasitic infections | |
| 1009 | Female | cancer, trauma, regeneration (in | Fertility |
| | Reproductive | vitro and in vivo), viral/bacterial/ | |
| | System/Cervix | parasitic infections | |
| 1010 | Female | cancer, trauma, regeneration (in | Fertility |
| | Reproductive | vitro and in vivo), viral/bacterial/ | |
| | System/Mammary | parasitic infections | |
| | gland/Breast | | |
| 1011 | Female | cancer, trauma, regeneration (in | Endometriosis, Fertility |
| | Reproductive | vitro and in vivo), viral/bacterial/ | |
| | System/Ovary | parasitic infections | |
| 1012 | Female | cancer, trauma, regeneration (in | Fertility |
| | Reproductive | vitro and in vivo), viral/bacterial/ | |
| | System/Placenta | parasitic infections | |
| 1013 | Female | cancer, trauma, regeneration (in | Endometriosis, Fertility |
| | Reproductive | vitro and in vivo), viral/bacterial/ | |
| | System/Uterus | parasitic infections | |
| 1014 | Gastro-intestinal/ | cancer, trauma, regeneration (in | Hirschsprung's disease, Crohn's |
| | Digestive System/ | vitro and in vivo), viral/bacterial/ | Disease, Appendicitis |
| | Large Intestine/ | parasitic infections | |
| | Colon | | |
| 1015 | Gastro-intestinal/ | cancer, trauma, regeneration (in | Von Hippel-Lindau (VHL) syndrome, |
| | Digestive System/ | vitro and in vivo), viral/bacterial/ | Cirrhosis, Transplantation |
| | Liver | parasitic infections | |
| 1016 | Gastro-intestinal/ | cancer, trauma, regeneration (in | Scleroderma |
| | Digestive System/ | vitro and in vivo), viral/bacterial/ | |
| | Oesophagus | parasitic infections | |
| 1017 | Gastro-intestinal/ | cancer, trauma, regeneration (in | Hypercalceimia, Ulcers |
| | Digestive System/ | vitro and in vivo), viral/bacterial/ | |
| | Stomach | parasitic infections | |
| 1018 | Gastro-intestinal/ | cancer, trauma, regeneration (in | |
| | Digestive | vitro and in vivo), viral/bacterial/ | |
| | System/Tongue | parasitic infections | |
| 1019 | Hematopoietic and | cancer, trauma, regeneration (in | Hemophilia, hypercoagulation, |
| | Lymphatic System/ | vitro and in vivo), viral/bacterial/ | Idiopathic thrombocytopenic purpura, |
| | Hematopoietic | parasitic infections | autoimmune disease, allergies, |
| | Tissues/Bone | | immunodeficiencies, transplantation, |
| | Marrow | | Graft versus host, |
| 1020 | Hematopoietic and | cancer, trauma, regeneration (in | Hemophilia, hypercoagulation, |
| | Lymphatic System/ | vitro and in vivo), viral/bacterial/ | idiopathic thrombocytopenic purpura, |
| | Hematopoietic | parasitic infections | autoimmune disease, allergies, |
| | Tissues/Lymphoid | | immunodeficiencies, transplantation, |
| | tissue | | Graft versus host disease (GVHD), |
| | | | Lymphaedema |
| 1021 | Hematopoietic and | cancer, trauma, regeneration (in | Hemophilia, Hypercoagulation, |
| | Lymphatic System/ | vitro and in vivo), viral/bacterial/ | Idiopathic thrombocytopenic purpura, |
| | Hematopoietic | parasitic infections | Immunodeficiencies, Graft versus host |
| | Tissues/Lymphoid | | |
| | tissue/Spleen | | |
| 1022 | Hematopoietic and | cancer, trauma, regeneration (in | Anemia, Ataxia-telangiectasia, |
| | Lymphatic System/ | vitro and in vivo), viral/bacterial/ | Autoimmune disease, |
| | Hematopoietic | parasitic infections | Immunodeficiencies |
| | Tissues/Peripheral | | |
| | Blood | | |
| 1023 | Hematopoietic and | cancer, trauma, regeneration (in | Hemophilia, hypercoagulation, |
| | Lymphatic System/ | vitro and in vivo), viral/bacterial/ | Idiopathic thrombocytopenic purpura, |
| | Hematopoietic | parasitic infections | immunodeficiencies |
| | Tissues/Thymus | | |
| 1024 | Hematopoietic and | cancer, trauma, regeneration (in | Tonsillitis |
| | Lymphatic System/ | vitro and in vivo), viral/bacterial/ | |
| | Hematopoietic | parasitic infections | |
| | Tissues/Tonsils | | |
| 1025 | Male Reproductive | cancer, trauma, regeneration (in | Fertility |
| | System/Prostate | vitro and in vivo), viral/bacterial/ | |
| | | parasitic infections | |
| 1026 | Male Reproductive | cancer, trauma, regeneration (in | Fertility |
| | System/Testis | vitro and in vivo), viral/bacterial/ | |
| | | parasitic infections | |
| 1027 | Musculoskeletal | cancer, trauma, regeneration (in | Osteoporosis, Hypercalcemia, Arthritis, |
| | System/Bone | vitro and in vivo), viral/bacterial/ | Ankylosing spondylitis, Scoliosis |
| | | parasitic infections | |
| 1028 | Musculoskeletal | cancer, trauma, regeneration (in | Muscular dystrophy, Lesch-Nyhan |
| | System/Muscle | vitro and in vivo), viral/bacterial/ | syndrome, Myasthenia gravis |
| | | parasitic infections | |
| 1029 | Musculoskeletal | cancer, trauma, regeneration (in | |
| | System/Muscle/ | vitro and in vivo), | |
| | Smooth Muscle | viral/bacterial/parasitic infections | |
| 1030 | Nervous System/ | cancer, trauma, regeneration (in | Von Hippel-Lindau (VHL) syndrome, |
| | Brain | vitro and in vivo), viral/bacterial/ | Alzheimer's disease, Stroke, Tuberous |
| | | parasitic infections | sclerosis, hypercalcemia, Parkinson's |
| | | | disease, Huntington's disease, Cerebral |
| | | | palsy, Epilepsy, Lesch-Nyhan |
| | | | syndrome, Multiple sclerosis, Ataxia- |
| | | | telangiectasia, Leukodystrophies, |
| | | | Behavioral disorders, Addiction, |
| | | | Anxiety, Pain, Neuroprotection |
| 1031 | Nervous System/ | cancer, trauma, regeneration (in | Endocrine dysfunctions, Diabetes, |
| | Brain/ | vitro and in vivo), viral/bacterial/ | obesity, Growth and reproductive |
| | Proencephalon/ | parasitic infections | disorders |
| | Forebrain/ | | |
| | Diencephalon/ | | |
| | Pituitary Gland | | |
| 1032 | Nervous System/ | cancer, trauma, regeneration (in | Von Hippel-Lindau (VHL) syndrome, |
| | Brain/Substantia | vitro and in vivo), viral/bacterial/ | Alzheimer's disease, Stroke, Tuberous |
| | Nigra | parasitic infections | sclerosis, hypercalcemia, Parkinson's |
| | | | disease, Huntington's disease, Cerebral |
| | | | palsy, Epilepsy, Lesch-Nyhan |
| | | | syndrome, Multiple sclerosis, Ataxia- |
| | | | telangiectasia, Leukodystrophies, |
| | | | Behavioral disorders, Addiction, |
| | | | Anxiety, Pain, Neuroprotection |
| 1033 | Respiratory | cancer, trauma, regeneration (in | Systemic lupus erythematosus, |
| | System/Lung | vitro and in vivo), viral/bacterial/ | Autoimmune disease, Asthma, |
| | | parasitic infections | Emphysema, Scleroderma |
| 1034 | Respiratory | cancer, trauma, regeneration (in | Allergies |
| | System/Nose/ | vitro and in vivo), viral/bacterial/ | |
| | Nasoepithelium | parasitic infections | |
| 1035 | Respiratory | cancer, trauma, regeneration (in | Pharyngitis |
| | System/Pharynx | vitro and in vivo), viral/bacterial/ | |
| | | parasitic infections | |
| 1036 | Sensory System/ | cancer, trauma, regeneration (in | Hearing loss, Tinitus |
| | Ear/Bony Labyrinth | vitro and in vivo), viral/bacterial/ | |
| | of inner ear/ | parasitic infections | |
| | Cochlea | | |
| 1037 | Sensory System/ | cancer, trauma, regeneration (in | Von Hippel-Lindau (VHL) syndrome, |
| | Eye/Retina | vitro and in vivo), viral/bacterial/ | Diabetes, Tuberous sclerosis |
| | | parasitic infections | |
| 1038 | Sensory System/ | cancer, trauma, regeneration (in | Psoriasis, Actinic keratosis, Tuberous |
| | Skin | vitro and in vivo), viral/bacterial/ | sclerosis |
| | | parasitic infections | |
| 1039 | Sensory System/ | cancer, trauma, regeneration (in | Psoriasis, Actinic keratosis, Tuberous |
| | Skin/Foreskin | vitro and in vivo), viral/bacterial/ | sclerosis |
| | | parasitic infections | |
| 1040 | Tissue Not | | |
| | Assigned | | |
| 1041 | Urinary System/ | cancer, trauma, regeneration (in | Diabetes, Autoimmune disease, Renal |
| | Kidney | vitro and in vivo), viral/bacterial/ | artery stenosis, Interstitial nephritis, |
| | | parasitic infections | Glomerulonephritis, Polycystic kidney |
| | | | disease, Systemic lupus erythematosus, |
| | | | Renal tubular acidosis, IgA |
| | | | nephropathy, Hypercalcemia, Lesch- |
| | | | Nyhab syndrome |
| 1042 | Whole Organism | cancer, trauma, tissue | |
| | | regeneration (in vitro and in | |
| | | vivo), viral/bacterial/parasitic | |
| | | infections, immunological | |
| | | disease, respiratory disease, | |
| | | gastro-intestinal diseases, | |
| | | reproductive health, neurological | |
| | | and neurodegenerative | |
| | | diseases, bone marrow | |
| | | transplantation, metabolic and | |
| | | endocrine diseases, allergy and | |
| | | inflammation, nephrological | |
| | | disorders, cardiovascular | |
| | | diseases, muscle, bone, joint | |
| | | and skeletal disorders, | |
| | | hematopoietic disorders, urinary | |
| | | system disorders | |

[0047] ORFX nucleic acids, and their encoded polypeptides, according to the invention are useful in a variety of applications and contexts. For example, various ORFX nucleic acids and polypeptides according to the invention are useful, inter alia, as novel members of the protein families indicated in Table 1, and/or according to the presence of domains and sequence relatedness to previously described proteins as summarized in Table 1.

[0048] ORFX nucleic acids and polypeptides according to the invention can also be used to identify cell types listed in Table 1 for an indicated ORFX according to the invention. Additional utilities for ORFX nucleic acids and polypeptides according to the invention are disclosed herein.

[0049] ORFX Nucleic Acids

[0050] The novel nucleic acids of the invention include those that encode an ORFX or ORFX-like protein, or biologically active portions thereof. The nucleic acids include nucleic acids encoding polypeptides that include the amino acid sequence of one or more of SEQ ID NO:2n, wherein n=1 to 1051. The encoded polypeptides can thus include, e.g., the amino acid sequences of SEQ ID NO: 2, 4, 6, 8, 10, . . . , 2094, 2096, 2098, 2100, and/or 2102. The nucleic acids include the nucleic acid sequences of one or more of SEQ ID NO:2n−1, wherein n=1 to 1051. The encoding nucleotides can thus include, e.g., the nucleic acid sequences of SEQ ID NO: 1, 3, 5, 7, 9, . . . , 2093, 2095, 2097, 2099, and/or 2101, as well as SEQ ID NOS. 2103-2125.

[0051] In some embodiments, a nucleic acid encoding a polypeptide having the amino acid sequence of one or more of SEQ ID NO:2n (wherein n=1 to 1051) includes the nucleic acid sequence of any of SEQ ID NO:2n−1 (wherein n=1 to 1051), or a fragment thereof. Additionally, the invention includes nucleic acids that are mutants or variants of any of SEQ ID NO:2n−1 (wherein n=1 to 1051), or a fragment thereof, any of whose bases maybe changed from the disclosed sequence while still encoding a protein that maintains its ORFX-like activities and physiological functions. The invention further includes the complement of the nucleic acid sequence of any of SEQ ID NO:2n−1 (wherein n=1 to 1051), including fragments, derivatives, analogs and homolog thereof. The invention additionally includes nucleic acids or nucleic acid fragments, or complements thereto, whose structures include chemical modifications.

[0052] Also included are nucleic acid fragments sufficient for use as hybridization probes to identify ORFX-encoding nucleic acids (e.g., ORFX mRNA) and fragments for use as polymerase chain reaction (PCR) primers for the amplification or mutation of ORFX nucleic acid molecules. As used herein, the term “nucleic acid molecule” is intended to include DNA molecules (e.g., cDNA or genomic DNA), RNA molecules (e.g., mRNA), analogs of the DNA or RNA generated using nucleotide analogs, and derivatives, fragments and homologs thereof. The nucleic acid molecule can be single-stranded or double-stranded, but preferably is double-stranded DNA.

[0053] “Probes” refer to nucleic acid sequences of variable length, preferably between at least about 10 nucleotides (nt), 100 nt, or as many as about, e.g., 6,000 nt, depending on use. Probes are used in the detection of identical, similar, or complementary nucleic acid sequences. Longer length probes are usually obtained from a natural or recombinant source, are highly specific and much slower to hybridize than oligomers. Probes may be single- or double-stranded and designed to have specificity in PCR, membrane-based hybridization technologies, or ELISA-like technologies.

[0054] An “isolated” nucleic acid molecule is one that is separated from other nucleic acid molecules that are present in the natural source of the nucleic acid. Examples of isolated nucleic acid molecules include, but are not limited to, recombinant DNA molecules contained in a vector, recombinant DNA molecules maintained in a heterologous host cell, partially or substantially purified nucleic acid molecules, and synthetic DNA or RNA molecules. Preferably, an “isolated” nucleic acid is free of sequences which naturally flank the nucleic acid (i.e., sequences located at the 5′ and 3′ ends of the nucleic acid) in the genomic DNA of the organism from which the nucleic acid is derived. For example, in various embodiments, the isolated ORFX nucleic acid molecule can contain less than about 50 kb, 25 kb, 5 kb, 4 kb, 3 kb, 2 kb, 1 kb, 0.5 kb or 0.1 kb of nucleotide sequences which naturally flank the nucleic acid molecule in genomic DNA of the cell from which the nucleic acid is derived. Moreover, an “isolated” nucleic acid molecule, such as a cDNA molecule, can be substantially free of other cellular material or culture medium when produced by recombinant techniques, or of chemical precursors or other chemicals when chemically synthesized.

[0055] A nucleic acid molecule of the present invention, e.g., a nucleic acid molecule having the nucleotide sequence of SEQ ID NO:2n−1 (wherein n=1 to 1051), or a complement of any of this nucleotide sequence, can be isolated using standard molecular biology techniques and the sequence information provided herein. Using all or a portion of the nucleic acid sequence of any of SEQ ID NO:2n−1 (wherein n=1 to 1051) as a hybridization probe, ORFX nucleic acid sequences can be isolated using standard hybridization and cloning techniques (e.g., as described in Sambrook et al., eds., MOLECULAR CLONING: A LABORATORY MANUAL 2^{nd} Ed., Cold Spring Harbor Laboratory Press, Cold Spring Harbor, NY, 1989; and Ausubel, et al., eds., CURRENT PROTOCOLS IN MOLECULAR BIOLOGY, John Wiley & Sons, New York, N.Y., 1993.)

[0056] A nucleic acid of the invention can be amplified using cDNA, mRNA or alternatively, genomic DNA, as a template and appropriate oligonucleotide primers according to standard PCR amplification techniques. The nucleic acid so amplified can be cloned into an appropriate vector and characterized by DNA sequence analysis. Furthermore, oligonucleotides corresponding to ORFX nucleotide sequences can be prepared by standard synthetic techniques, e.g., using an automated DNA synthesizer.

[0057] As used herein, the term “oligonucleotide” refers to a series of linked nucleotide residues, which oligonucleotide has a sufficient number of nucleotide bases to be used in a PCR reaction. A short oligonucleotide sequence may be based on, or designed from, a genomic or cDNA sequence and is used to amplify, confirm, or reveal the presence of an identical, similar or complementary DNA or RNA in a particular cell or tissue. Oligonucleotides comprise portions of a nucleic acid sequence having about 10 nt, 50 nt, or 100 nt in length, preferably about 15 nt to 30 nt in length. In one embodiment, an oligonucleotide comprising a nucleic acid molecule less than 100 nt in length would further comprise at lease 6 contiguous nucleotides of any of SEQ ID NO:2n−1 (wherein n=1 to 1051), or a complement thereof. Oligonucleotides may be chemically synthesized and may be used as probes.

[0058] In another embodiment, an isolated nucleic acid molecule of the invention comprises a nucleic acid molecule that is a complement of the nucleotide sequence shown in any of SEQ ID NO:2n−1 (wherein n=1 to 1051). In another embodiment, an isolated nucleic acid molecule of the invention comprises a nucleic acid molecule that is a complement of the nucleotide sequence shown in any of SEQ ID NO:2n−1 (wherein n=1 to 1051), or a portion of this nucleotide sequence. A nucleic acid molecule that is complementary to the nucleotide sequence shown in is one that is sufficiently complementary to the nucleotide sequence shown in of any of SEQ ID NO:2n−1 (wherein n=1 to 1051) that it can hydrogen bond with little or no mismatches to the nucleotide sequence shown in of any of SEQ ID NO:2n−1 (wherein n=1 to 1051), thereby forming a stable duplex.

[0059] As used herein, the term “complementary” refers to Watson-Crick or Hoogsteen base pairing between nucleotides units of a nucleic acid molecule, and the term “binding” means the physical or chemical interaction between two polypeptides or compounds or associated polypeptides or compounds or combinations thereof. Binding includes ionic, non-ionic, Von der Waals, hydrophobic interactions, etc. A physical interaction can be either direct or indirect. Indirect interactions may be through or due to the effects of another polypeptide or compound. Direct binding refers to interactions that do not take place through, or due to, the effect of another polypeptide or compound, but instead are without other substantial chemical intermediates.

[0060] Moreover, the nucleic acid molecule of the invention can comprise only a portion of the nucleic acid sequence of any of SEQ ID NO:2n−1 (wherein n=1 to 1051), e.g., a fragment that can be used as a probe or primer, or a fragment encoding a biologically active portion of ORFX. Fragments provided herein are defined as sequences of at least 6 (contiguous) nucleic acids or at least 4 (contiguous) amino acids, a length sufficient to allow for specific hybridization in the case of nucleic acids or for specific recognition of an epitope in the case of amino acids, respectively, and are at most some portion less than a full length sequence. Fragments may be derived from any contiguous portion of a nucleic acid or amino acid sequence of choice. Derivatives are nucleic acid sequences or amino acid sequences formed from the native compounds either directly or by modification or partial substitution. Analogs are nucleic acid sequences or amino acid sequences that have a structure similar to, but not identical to, the native compound but differs from it in respect to certain components or side chains. Analogs may be synthetic or from a different evolutionary origin and may have a similar or opposite metabolic activity compared to wild type.

[0061] Derivatives and analogs may be lull length or other than full length, if the derivative or analog contains a modified nucleic acid or amino acid, as described below. Derivatives or analogs of the nucleic acids or proteins of the invention include, but are not limited to, molecules comprising regions that are substantially homologous to the nucleic acids or proteins of the invention, in various embodiments, by at least about 70%, 80%, 85%, 90%, 95%, 98%, or even 99% identity (with a preferred identity of 80-99%) over a nucleic acid or amino acid sequence of identical size or when compared to an aligned sequence in which the alignment is done by a computer homology program known in the art, or whose encoding nucleic acid is capable of hybridizing to the complement of a sequence encoding the aforementioned proteins under stringent, moderately stringent, or low stringent conditions. See e.g. Ausubel, et al., CURRENT PROTOCOLS IN MOLECULAR BIOLOGY, John Wiley & Sons, New York, NY, 1993, and below. An exemplary program is the Gap program (Wisconsin Sequence Analysis Package, Version 8 for UNIX, Genetics Computer Group, University Research Park, Madison, Wis.) using the default settings, which uses the algorithm of Smith and Waterman (Adv. Appl. Math., 1981, 2: 482-489, which is incorporated herein by reference in its entirety).

[0062] A “homologous nucleic acid sequence” or “homologous amino acid sequence,” or variations thereof, refer to sequences characterized by a homology at the nucleotide level or amino acid level as discussed above. Homologous nucleotide sequences encode those sequences coding for isoforms of ORFX polypeptide. Isoforms can be expressed in different tissues of the same organism as a result of, for example, alternative splicing of RNA. Alternatively, isoforms can be encoded by different genes. In the present invention, homologous nucleotide sequences include nucleotide sequences encoding for an ORFX polypeptide of species other than humans, including, but not limited to, mammals, and thus can include, e.g., mouse, rat, rabbit, dog, cat cow, horse, and other organisms. Homologous nucleotide sequences also include, but are not limited to, naturally occurring allelic variations and mutations of the nucleotide sequences set forth herein. A homologous nucleotide sequence does not, however, include the nucleotide sequence encoding human ORFX protein. Homologous nucleic acid sequences include those nucleic acid sequences that encode conservative amino acid substitutions (see below) in any of SEQ ID NO:2n (wherein n=1 to 1051) as well as a polypeptide having ORFX activity. Biological activities of the ORFX proteins are described below. A homologous amino acid sequence does not encode the amino acid sequence of a human ORFX polypeptide.

[0063] The nucleotide sequence determined from the cloning of the human ORFX gene allows for the generation of probes and primers designed for use in identifying the cell types disclosed and/or cloning ORFX homologues in other cell types, e.g., from other tissues, as well as ORFX homologues from other mammals. The probe/primer typically comprises a substantially purified oligonucleotide. The oligonucleotide typically comprises a region of nucleotide sequence that hybridizes under stringent conditions to at least about 12, 25, 50, 100, 150, 200, 250, 300, 350 or 400 or more consecutive sense strand nucleotide sequence of SEQ ID NO:2n−1 (wherein n=1 to 1051); or an anti-sense strand nucleotide sequence of SEQ ID NO:2n−1 (wherein n=1 to 1051); or of a naturally occurring mutant of SEQ ID NO:2n−1 (wherein n=1 to 1051).

[0064] Probes based on the human ORFX nucleotide sequence can be used to detect transcripts or genomic sequences encoding the same or homologous proteins. In various embodiments, the probe further comprises a label group attached thereto, e.g., the label group can be a radioisotope, a fluorescent compound, an enzyme, or an enzyme co-factor. Such probes can be used as a part of a diagnostic test kit for identifying cells or tissue which misexpress an ORFX protein, such as by measuring a level of an ORFX-encoding nucleic acid in a sample of cells from a subject e.g., detecting ORFX mRNA levels or determining whether a genomic ORFX gene has been mutated or deleted.

[0065] “A polypeptide having a biologically active portion of ORFX” refers to polypeptides exhibiting activity similar, but not necessarily identical to, an activity of a polypeptide of the present invention, including mature forms, as measured in a particular biological assay, with or without dose dependency. A nucleic acid fragment encoding a “biologically active portion of ORFX” can be prepared by isolating a portion of SEQ ID NO:2n−1 (wherein n=1 to 1051), that encodes a polypeptide having an ORFX biological activity (biological activities of the ORFX proteins are summarized in Table 1), expressing the encoded portion of ORFX protein (e.g., by recombinant expression in vitro) and assessing the activity of the encoded portion of ORFX. For example, a nucleic acid fragment encoding a biologically active portion of ORFX can optionally include a domain as shown in Table 1, column 4.

[0066] ORFX Variants

[0067] The invention further encompasses nucleic acid molecules that differ from the disclosed ORFX nucleotide sequences due to degeneracy of the genetic code. These nucleic acids thus encode the same ORFX protein as that encoded by the nucleotide sequence shown in SEQ ID NO:2n−1 (wherein n=1 to 1051). In another embodiment, an isolated nucleic acid molecule of the invention has a nucleotide sequence encoding a protein having an amino acid sequence shown in any of SEQ ID NO:2n (wherein n=1 to 1051).

[0068] In addition to the human ORFX nucleotide sequence shown in any of SEQ ID NO:2n−1 (wherein n=1 to 1051), it will be appreciated by those skilled in the art that DNA sequence polymorphisms that lead to changes in the amino acid sequences of ORFX may exist within a population (e.g., the human population). Such genetic polymorphism in the ORFX gene may exist among individuals within a population due to natural allelic variation. As used herein, the terms “gene” and “recombinant gene” refer to nucleic acid molecules comprising an open reading frame encoding an ORFX protein, preferably a mammalian ORFX protein. Such natural allelic variations can typically result in 1-5% variance in the nucleotide sequence of the ORFX gene. Any and all such nucleotide variations and resulting amino acid polymorphisms in ORFX that are the result of natural allelic variation and that do not alter the functional activity of ORFX are intended to be within the scope of the invention.

[0069] Moreover, nucleic acid molecules encoding ORFX proteins from other species, and thus that have a nucleotide sequence that differs from the human sequence of any of SEQ ID NO:2n−1 (wherein n=1 to 1051), are intended to be within the scope of the invention. Nucleic acid molecules corresponding to natural allelic variants and homologues of the ORFX cDNAs of the invention can be isolated based on their homology to the human ORFX nucleic acids disclosed herein using the human cDNAs, or a portion thereof, as a hybridization probe according to standard hybridization techniques under stringent hybridization conditions.

[0070] In another embodiment, an isolated nucleic acid molecule of the invention is at least 6 nucleotides in length and hybridizes under stringent conditions to the nucleic acid molecule comprising the nucleotide sequence of any of SEQ ID NO:2n−1 (wherein n=1 to 1051). In another embodiment, the nucleic acid is at least 10, 25, 50, 100, 250, 500 or 750 nucleotides in length. In another embodiment, an isolated nucleic acid molecule of the invention hybridizes to the coding region. As used herein, the term “hybridizes under stringent conditions” is intended to describe conditions for hybridization and washing under which nucleotide sequences at least 60% homologous to each other typically remain hybridized to each other.

[0071] Homologs (i.e., nucleic acids encoding ORFX proteins derived from species other than human) or other related sequences (e.g., paralogs) can be obtained by low, moderate or high stringency hybridization with all or a portion of the particular human sequence as a probe using methods well known in the art for nuclei c acid hybridization and cloning.

[0072] As used herein, the phrase “stringent hybridization conditions” refers to conditions under which a probe, primer or oligonucleotide will hybridize to its target sequence, but to no other sequences. Stringent conditions are sequence-dependent and will be different in different circumstances. Longer sequences hybridize specifically at higher temperatures than shorter sequences. Generally, stringent conditions are selected to be about 5° C. lower than the thermal melting point (Tm) for the specific sequence at a defined ionic strength and pH. The Tm is the temperature (under defined ionic strength, pH and nucleic acid concentration) at which 50% of the probes complementary to the target sequence hybridize to the target sequence at equilibrium. Since the target sequences are generally present at excess, at Tm, 50% of the probes are occupied at equilibrium. Typically, stringent conditions will be those in which the salt concentration is less than about 1.0 M sodium ion, typically about 0.01 to 1.0 M sodium ion (or other salts) at pH 7.0 to 8.3 and the temperature is at least about 30° C. for short probes, primers or oligonucleotides (e.g., 10 nt to 50 nt) and at least about 60° C. for longer probes, primers and oligonucleotides. Stringent conditions may also be achieved with the addition of destabilizing agents, such as formamide.

[0073] Stringent conditions are known to those skilled in the art and can be found in CURRENT PROTOCOLS IN MOLECULAR BIOLOGY, John Wiley & Sons, N.Y. (1989), 6.3.1-6.3.6. Preferably, the conditions are such that sequences at least about 65%, 70%, 75%, 85%, 90%, 95%, 98%, or 99% homologous to each other typically remain hybridized to each other. A non-limiting example of stringent hybridization conditions is hybridization in a high salt buffer comprising 6× SSC, 50 mM Tris-HCl (pH 7.5), 1 mM EDTA, 0.02% PVP, 0.02% Ficoll, 0.02% BSA, and 500 mg/ml denatured salmon sperm DNA at 65° C. This hybridization is followed by one or more washes in 0.2× SSC, 0.01% BSA at 50° C. An isolated nucleic acid molecule of the invention that hybridizes under stringent conditions to the sequence of any of SEQ ID NO:2n−1 (wherein n=1 to 1051) corresponds to a naturally occurring nucleic acid molecule. As used herein, a “naturally-occurring” nucleic acid molecule refers to an RNA or DNA molecule having a nucleotide sequence that occurs in nature (e.g., encodes a natural protein).

[0074] In a second embodiment, a nucleic acid sequence that is hybridizable to the nucleic acid molecule comprising the nucleotide sequence of any of SEQ ID NO:2n−1 (wherein n=1 to 1051), or fragments, analogs or derivatives thereof, under conditions of moderate stringency is provided. A non-limiting example of moderate stringency hybridization conditions are hybridization in 6× SSC, 5× Denhardt's solution, 0.5% SDS and 100 mg/ml denatured salmon sperm DNA at 55° C., followed by one or more washes in 1× SSC, 0.1% SDS at 37° C. Other conditions of moderate stringency that may be used are well known in the art. See, e.g., Ausubel et al. (eds.), 1993, CURRENT PROTOCOLS IN MOLECULAR BIOLOGY, John Wiley & Sons, NY, and Kriegler, 1990, GENE TRANSFER AND EXPRESSION, A LABORATORY MANUAL, Stockton Press, NY.

[0075] In a third embodiment, a nucleic acid that is hybridizable to the nucleic acid molecule comprising the nucleotide sequence of any of SEQ ID NO:2n−1 (wherein n=1 to 1051), or fragments, analogs or derivatives thereof, under conditions of low stringency, is provided. A non-limiting example of low stringency hybridization conditions are hybridization in 35% formamide, 5× SSC, 50 mM Tris-HCl (pH 7.5), 5 mM EDTA, 0.02% PVP, 0.02% Ficoll, 0.2% BSA, 100 mg/ml denatured salmon sperm DNA, 10% (wt/vol) dextran sulfate at 40° C., followed by one or more washes in 2× SSC, 25 mM Tris-HCl (pH 7.4), 5 mM EDTA, and 0.1% SDS at 50° C. Other conditions of low stringency that may be used are well known in the art (e.g., as employed for cross-species hybridizations). See, e.g., Ausubel et al. (eds.), 1993, CURRENT PROTOCOLS IN MOLECULAR BIOLOGY, John Wiley & Sons, NY, and Kriegler, 1990,GENE TRANSFER AND EXPRESSION, A LABORATORY MANUAL, Stockton Press, NY; Shilo and Weinberg, 1981, Proc Natl Acad Sci USA 78: 6789-6792.

[0076] Conservative Mutations

[0077] In addition to naturally-occurring allelic variants of the ORFX sequence that may exist in the population, the skilled artisan will further appreciate that changes can be introduced by mutation into the nucleotide sequence of any of SEQ ID NO:2n−1 (wherein n=1 to 1051), thereby leading to changes in the amino acid sequence of the encoded ORFX protein, without altering the functional ability of the ORFX protein. For example, nucleotide substitutions leading to amino acid substitutions at “non-essential” amino acid residues can be made in the sequence of any of SEQ ID NO:2n−1 (wherein n=1 to 1051). A “non-essential” amino acid residue is a residue that can be altered from the wild-type sequence of ORFX without altering the biological activity, whereas an “essential” amino acid residue is required for biological activity. For example, amino acid residues that are conserved among the ORFX proteins of the present invention, are predicted to be particularly unamenable to alteration.

[0078] Amino acid residues that are conserved among members of an ORFX family members are predicted to be less amenable to alteration. For example, an ORFX protein according to the present invention can contain at least one domain (e.g., as shown in Table 1) that is a typically conserved region in an ORFX family member. As such, these conserved domains are not likely to be amenable to mutation. Other amino acid residues, however, (e.g., those that are not conserved or only semi-conserved among members of the ORFX family) may not be as essential for activity and thus are more likely to be amenable to alteration.

[0079] Another aspect of the invention pertains to nucleic acid molecules encoding ORFX proteins that contain changes in amino acid residues that are not essential for activity. Such ORFX proteins differ in amino acid sequence from any of any of SEQ ID NO:2n (wherein n=1 to 1051), yet retain biological activity. In one embodiment, the isolated nucleic acid molecule comprises a nucleotide sequence encoding a protein, wherein the protein comprises an amino acid sequence at least about 75% homologous to the amino acid sequence of any of SEQ ID NO:2n (wherein n=1 to 1051). Preferably, the protein encoded by the nucleic acid is at least about 80% homologous to any of SEQ ID NO:2n (wherein n=1 to 1051), more preferably at least about 90%, 95%, 98%., and most preferably at least about 99% homologous to SEQ ID NO:2.

[0080] An isolated nucleic acid molecule encoding an ORFX protein homologous to the protein of any of SEQ ID NO:2n (wherein n=1 to 1051) can be created by introducing one or more nucleotide substitutions, additions or deletions into the corresponding nucleotide sequence, i.e. SEQ ID NO:2n−1 for the corresponding n, such that one or more amino acid substitutions, additions or deletions are introduced into the encoded protein.

[0081] Mutations can be introduced into SEQ ID NO:2n−1 (wherein n=1 to 1051) by standard techniques, such as site-directed mutagenesis and PCR-mediated mutagenesis. Preferably, conservative amino acid substitutions are made at one or more predicted non-essential amino acid residues. A “conservative amino acid substitution” is one in which the amino acid residue is replaced with an amino acid residue having a similar side chain. Families of amino acid residues having similar side chains have been defined in the art. These families include amino acids with basic side chains (e.g., lysine, arginine, histidine), acidic side chains (e.g., aspartic acid, glutamic acid), uncharged polar side chains (e.g., glycine, asparagine, glutamine, serine, threonine, tyrosine, cysteine), nonpolar side chains (e.g., alanine, valine, leucine, isoleucine, proline, phenylalanine, methionine, tryptophan), beta-branched side chains (e.g., threonine, valine, isoleucine) and aromatic side chains (e.g., tyrosine, phenylalanine, tryptophan, histidine). Thus, a predicted nonessential amino acid residue in ORFX is replaced with another amino acid residue from the same side chain family. Alternatively, in another embodiment, mutations can be introduced randomly along all or part of an ORFX coding sequence, such as by saturation mutagenesis, and the resultant mutants can be screened for ORFX biological activity to identify mutants that retain activity. Following mutagenesis of SEQ ID NO:2n−1 (wherein n=1 to 1051), the encoded protein can be expressed by any recombinant technology known in the art and the activity of the protein can be determined.

[0082] In one embodiment, a mutant ORFX protein can be assayed for (1) the ability to form protein:protein interactions with other ORFX proteins, other cell-surface proteins, or biologically active portions thereof, (2) complex formation between a mutant ORFX protein and an ORFX receptor; (3) the ability of a mutant ORFX protein to bind to an intracellular target protein or biologically active portion thereof; (e.g., avidin proteins); (4) the ability to bind BRA protein; or (5) the ability to specifically bind an anti-ORFX protein antibody.

[0083] Antisense

[0084] Another aspect of the invention pertains to isolated antisense nucleic acid molecules that are hybridizable to or complementary to the nucleic acid molecule comprising the nucleotide sequence of SEQ ID NO:2n−1 (wherein n=1 to 1051), or fragments, analogs or derivatives thereof. An “antisense” nucleic acid comprises a nucleotide sequence that is complementary to a “sense” nucleic acid encoding a protein, e.g., complementary to the coding strand of a double-stranded cDNA molecule or complementary to an mRNA sequence. In specific aspects, antisense nucleic acid molecules are provided that comprise a sequence complementary to at least about 10, 25, 50, 100, 250 or 500 nucleotides or an entire ORFX coding strand, or to only a portion thereof. Nucleic acid molecules encoding fragments, homologs, derivatives and analogs of an ORFX protein of any of SEQ ID NO:2n (wherein n=1 to 1051) or antisense nucleic acids complementary to an ORFX nucleic acid sequence of SEQ ID NO:2n−1 (wherein n=1 to 1051) are additionally provided.

[0085] In one embodiment, an antisense nucleic acid molecule is antisense to a “coding region” of the coding strand of a nucleotide sequence encoding ORFX. The term “coding region” refers to the region of the nucleotide sequence comprising codons which are translated into amino acid residues (e.g., the protein coding region of a human ORFX that corresponds to any of SEQ ID NO:2n (wherein n=1 to 1051)). In another embodiment, the antisense nucleic acid molecule is antisense to a “noncoding region” of the coding strand of a nucleotide sequence encoding ORFX. The term “noncoding region” refers to 5′ and 3′ sequences which flank the coding region that are not translated into amino acids (i.e., also referred to as 5′ and 3′ untranslated regions).

[0086] Given the coding strand sequences encoding ORFX disclosed herein (e.g., SEQ ID NO:2n−1 (wherein n=1 to 1051) ), antisense nucleic acids of the invention can be designed according to the rules of Watson and Crick or Hoogsteen base pairing. The antisense nucleic acid molecule can be complementary to the entire coding region of ORFX mRNA, but more preferably is an oligonucleotide that is antisense to only a portion of the coding or noncoding region of ORFX mRNA. For example, the antisense oligonucleotide can be complementary to the region surrounding the translation start site of ORFX mRNA. An antisense oligonucleotide can be, for example, about 5, 10, 15, 20, 25, 30, 35, 40, 45 or 50 nucleotides in length. An antisense nucleic acid of the invention can be constructed using chemical synthesis or enzymatic ligation reactions using procedures known in the art. For example, an antisense nucleic acid (e.g., an antisense oligonucleotide) can be chemically synthesized using naturally occurring nucleotides or variously modified nucleotides designed to increase the biological stability of the molecules or to increase the physical stability of the duplex formed between the antisense and sense nucleic acids, e.g., phosphorothioate derivatives and acridine substituted nucleotides can be used.

[0087] Examples of modified nucleotides that can be used to generate the antisense nucleic acid include: 5-fluorouracil, 5-bromouracil, 5-chlorouracil, 5-iodouracil, hypoxanthine, xanthine, 4-acetylcytosine, 5-(carboxyhydroxylmethyl) uracil, 5-carboxymethylaminomethyl-2-thiouridine, 5-carboxymethylaminomethyluracil, dihydrouracil, beta-D-galactosylqueosine, inosine, N6-isopentenyladenine, 1-methylguanine, 1-methylinosine, 2,2-dimethylguanine, 2-methyladenine, 2-methylguanine, 3-methylcytosine, 5-methylcytosine, N6-adenine, 7-methylguanine, 5-methylaminomethyluracil, 5-methoxyaminomethyl-2-thiouracil, beta-D-mannosylqueosine, 5′-methoxycarboxymethyluracil, 5-methoxyuracil, 2-methylthio-N6-isopentenyladenine, uracil-5-oxyacetic acid (v), wybutoxosine, pseudouracil, queosine, 2-thiocytosine, 5-methyl-2-thiouracil, 2-thiouracil, 4-thiouracil, 5-methyluracil, uracil-5-oxyacetic acid methylester, uracil-5-oxyacetic acid (v), 5-methyl-2-thiouracil, 3-(3-amino-3-N-2-carboxypropyl) uracil, (acp3)w, and 2,6-diaminopurine. Alternatively, the antisense nucleic acid can be produced biologically using an expression vector into which a nucleic acid has been subcloned in an anitisense orientation (i.e., RNA transcribed from the inserted nucleic acid will be of an antisense orientation to a target nucleic acid of interest, described further in the following subsection).

[0088] The antisense nucleic acid molecules of the invention are typically administered to a subject or generated in situ such that they hybridize with or bind to cellular mRNA and/or genomic DNA encoding an ORFX protein to thereby inhibit expression of the protein, e.g., by inhibiting transcription and/or translation. The hybridization can be by conventional nucleotide complementarity to form a stable duplex, or, for example, in the case of an antisense nucleic acid molecule that binds to DNA duplexes, through specific interactions in the major groove of the double helix. An example of a route of administration of antisense nucleic acid molecules of the invention includes direct injection at a tissue site. Alternatively, antisense nucleic acid molecules can be modified to target selected cells and then administered systemically. For example, for systemic administration, antisense molecules can be modified such that they specifically bind to receptors or antigens expressed on a selected cell surface, e.g., by linking the antisense nucleic acid molecules to peptides or antibodies that bind to cell surface receptors or antigens. The antisense nucleic acid molecules can also be delivered to cells using the vectors described herein. To achieve sufficient intracellular concentrations of antisense molecules, vector constructs in which the antisense nucleic acid molecule is placed under the control of a strong pol II or pol III promoter are preferred.

[0089] In yet another embodiment, the antisense nucleic acid molecule of the invention is an α-anomeric nucleic acid molecule. An α-anomeric nucleic acid molecule forms specific double-stranded hybrids with complementary RNA in which, contrary to the usual β-units, the strands run parallel to each other (Gaultier et al. (1987) Nucleic Acids Res 15: 6625-6641). The antisense nucleic acid molecule can also comprise a 2′-o-methylribonucleotide (Inoue et al. (1987) Nucleic Acids Res 15: 6131-6148) or a chimeric RNA-DNA analogue (Inoue et al. (1987) FEBS Lett 215: 327-330).

[0090] Ribozymes and PNA Moieties

[0091] Such modifications include, by way of nonlimiting example, modified bases, and nucleic acids whose sugar phosphate backbones are modified or derivatized. These modifications are carried out at least in part to enhance the chemical stability of the modified nucleic acid, such that they may be used, for example, as antisense binding nucleic acids in therapeutic applications in a subject.

[0092] In still another embodiment, an antisense nucleic acid of the invention is a ribozyme. Ribozymes are catalytic RNA molecules with ribonuclease activity that are capable of cleaving a single-stranded nucleic acid, such as an mRNA, to which they have a complementary region. Thus, ribozymes (e.g., hammerhead ribozymes (described in Haselhoff and Gerlach (1988) Nature 334:585-591)) can be used to catalytically cleave ORFX mRNA transcripts to thereby inhibit translation of ORFX mRNA. A ribozyme having specificity for an ORFX-encoding nucleic acid can be designed based upon the nucleotide sequence of an ORFX DNA disclosed herein (i.e., SEQ ID NO:2n-I (wherein n=1 to 1051)). For example, a derivative of a Tetrahymena L-19 IVS RNA can be constructed in which the nucleotide sequence of the active site is complementary to the nucleotide sequence to be cleaved in an ORFX-encoding mRNA. See, e.g., Cech et al. U.S. Pat. No. 4,987,071 and Cech et al. U.S. Pat. No. 5,116,742. Alternatively, ORFX mRNA can be used to select a catalytic RNA having a specific ribonuclease activity from a pool of RNA molecules. See, e.g., Bartel et al., (1993) Science 261:1411-1418.

[0093] Alternatively, ORFX gene expression can be inhibited by targeting nucleotide sequences complementary to the regulatory region of the ORFX (e.g., the ORFX promoter and/or enhancers) to form triple helical structures that prevent transcription of the ORFX gene in target cells. See generally, Helene. (1991) Anticancer Drug Des. 6: 569-84; Helene. et al. (1992) Ann. N.Y. Acad. Sci. 660:27-36; and Maher (1992) Bioassays 14: 807-15.

[0094] In various embodiments, the nucleic acids of ORFX can be modified at the base moiety, sugar moiety or phosphate backbone to improve, e.g., the stability, hybridization, or solubility of the molecule. For example, the deoxyribose phosphate backbone of the nucleic acids can be modified to generate peptide nucleic acids (see Hyrup et al. (1996) Bioorg Med Chem 4: 5-23). As used herein, the terms “peptide nucleic acids” or “PNAs” refer to nucleic acid mimics, e.g., DNA mimics, in which the deoxyribose phosphate backbone is replaced by a pseudopeptide backbone and only the four natural nucleobases are retained. The neutral backbone of PNAs has been shown to allow for specific hybridization to DNA and RNA under conditions of low ionic strength. The synthesis of PNA oligomers can be performed using standard solid phase peptide synthesis protocols as described in Hyrup et al. (1996) above; Perry-O'Keefe et al. (1996) PNAS 93: 14670-675.

[0095] PNAs of ORFX can be used in therapeutic and diagnostic applications. For example, PNAs can be used as antisense or antigene agents for sequence-specific modulation of gene expression by, e.g., inducing transcription or translation arrest or inhibiting replication. PNAs of ORFX can also be used, e.g., in the analysis of single base pair mutations in a gene by, e.g., PNA directed PCR clamping; as artificial restriction enzymes when used in combination with other enzymes, e.g., S1 nucleases (Hyrup B. (1996) above); or as probes or primers for DNA sequence and hybridization (Hyrup et al. (1996), above; Perry-O'Keefe (1996), above).

[0096] In another embodiment, PNAs of ORFX can be modified, e.g., to enhance their stability or cellular uptake, by attaching lipophilic or other helper groups to PNA, by the formation of PNA-DNA chimeras, or by the use of liposomes or other techniques of drug delivery known in the art. For example, PNA-DNA chimeras of ORFX can be generated that may combine the advantageous properties of PNA and DNA. Such chimeras allow DNA recognition enzymes, e.g., RNase H and DNA polymerases, to interact with the DNA portion while the PNA portion would provide high binding affinity and specificity. PNA-DNA chimeras can be linked using linkers of appropriate lengths selected in terms of base stacking, number of bonds between the nucleobases, and orientation (Hyrup (1996) above). The synthesis of PNA-DNA chimeras can be performed as described in Hyrup (1996) above and Finn et al (1996) Nucl Acids Res 24: 3357-63. For example, a DNA chain can be synthesized on a solid support using standard phosphoramidite coupling chemistry, and modified nucleoside analogs, e.g., 5′-(4-methoxytrityl)amino-5′-deoxy-thymidine phosphoramidite, can be used between the PNA and the 5′ end of DNA (Mag et al. (1989) Nucl Acid Res 17: 5973-88). PNA monomers are then coupled in a stepwise manner to produce a chimeric molecule with a 5′ PNA segment and a 3′ DNA segment (Finn et al. (1996) above). Alternatively, chimeric molecules can be synthesized with a 5′ DNA segment and a 3′ PNA segment. See, Petersen et al. (1975) Bioorg Med Chem Lett 5: 1119-11124.

[0097] In other embodiments, the oligonucleotide may include other appended groups such as peptides (e.g., for targeting host cell receptors in vivo), or agents facilitating transport across the cell membrane (see, e.g., Letsinger et al., 1989, Proc. Natl. Acad. Sci. U.S.A. 86:6553-6556; Lemaitre et al., 1987, Proc. Natl. Acad. Sci. 84:648-652; PCT Publication No. WO88/09810) or the blood-brain barrier (see, e.g., PCT Publication No. WO89/10134). In addition, oligonucleotides can be modified with hybridization triggered cleavage agents (See, e.g., Krol et al., 1988, BioTechniques 6:958-976) or intercalating agents. (See, e.g., Zon, 1988, Pharm. Res. 5: 539-549). To this end, the oligonucleotide may be conjugated to another molecule, e.g., a peptide, a hybridization triggered cross-linking agent, a transport agent, a hybridization-triggered cleavage agent, etc.

[0098] ORFX Polypeptides

[0099] The novel protein of the invention includes the ORFX-like protein whose sequence is provided in any of SEQ ID NO:2n (wherein n=1 to 1051). The invention also includes a mutant or variant protein any of whose residues may be changed from the corresponding residue shown in FIG. 1 while still encoding a protein that maintains its ORFX-like activities and physiological functions, or a functional fragment thereof. For example, the invention includes the polypeptides encoded by the variant ORFX nucleic acids described above. In the mutant or variant protein, up to 20% or more of the residues may be so changed.

[0100] In general, an ORFX-like variant that preserves ORFX-like function includes any variant in which residues at a particular position in the sequence have been substituted by other amino acids, and further include the possibility of inserting an additional residue or residues between two residues of the parent protein as well as the possibility of deleting one or more residues from the parent sequence. Any amino acid substitution, insertion, or deletion is encompassed by the invention. In favorable circumstances, the substitution is a conservative substitution as defined above. Furthermore, without limiting the scope of the invention, positions of any of SEQ ID NO:2n (wherein n=1 to 1051) may be substitute such that a mutant or variant protein may include one or more substitutions.

[0101] The invention also includes isolated ORFX proteins, and biologically active portions thereof, or derivatives, fragments, analogs or homologs thereof. Also provided are polypeptide fragments suitable for use as immunogens to raise anti-ORFX antibodies. In one embodiment, native ORFX proteins can be isolated from cells or tissue sources by an appropriate purification scheme using standard protein purification techniques. In another embodiment, ORFX proteins are produced by recombinant DNA techniques. Alternative to recombinant expression, an ORFX protein or polypeptide can be synthesized chemically using standard peptide synthesis techniques.

[0102] An “isolated” or “purified” protein or biologically active portion thereof is substantially free of cellular material or other contaminating proteins from the cell or tissue source from which the ORFX protein is derived, or substantially free from chemical precursors or other chemicals when chemically synthesized. The language “substantially free of cellular material” includes preparations of ORFX protein in which the protein is separated from cellular components of the cells from which it is isolated or recombinantly produced. In one embodiment, the language “substantially free of cellular material” includes preparations of ORFX protein having less than about 30% (by dry weight) of non-ORFX protein (also referred to herein as a “contaminating protein”), more preferably less than about 20% of non-ORFX protein, still more preferably less than about 10% of non-ORFX protein, and most preferably less than about 5% non-ORFX protein. When the ORFX protein or biologically active portion thereof is recombinantly produced, it is also preferably substantially free of culture medium, i.e., culture medium represents less than about 20%, more preferably less than about 10%, and most preferably less than about 5% of the volume of the protein preparation.

[0103] The language “substantially free of chemical precursors or other chemicals” includes preparations of ORFX protein in which the protein is separated from chemical precursors or other chemicals that are involved in the synthesis of the protein. In one embodiment, the language “substantially free of chemical precursors or other chemicals” includes preparations of ORFX protein having less than about 30% (by dry weight) of chemical precursors or non-ORFX chemicals, more preferably less than about 20% chemical precursors or non-ORFX chemicals, still more preferably less than about 10% chemical precursors or non-ORFX chemicals, and most preferably less than about 5% chemical precursors or non-ORFX chemicals.

[0104] Biologically active portions of an ORFX protein include peptides comprising amino acid sequences sufficiently homologous to or derived from the amino acid sequence of the ORFX protein, e.g., the amino acid sequence shown in SEQ ID NO:2 that include fewer amino acids than the full length ORFX proteins, and exhibit at least one activity of an ORFX protein. Typically, biologically active portions comprise a domain or motif with at least one activity of the ORFX protein. A biologically active portion of an ORFX protein can be a polypeptide which is, for example, 10, 25, 50, 100 or more amino acids in length.

[0105] A biologically active portion of an ORFX protein of the present invention may contain at least one of the above-identified domains conserved between the FGF family of proteins. Moreover, other biologically active portions, in which other regions of the protein are deleted, can be prepared by recombinant techniques and evaluated for one or more of the functional activities of a native ORFX protein.

[0106] In an embodiment, the ORFX protein has an amino acid sequence shown in any of SEQ ID NO:2n (wherein n=1 to 1051). In other embodiments, the ORFX protein is substantially homologous to any of SEQ ID NO:2n (wherein n=1 to 1051) and retains the functional activity of the protein of any of SEQ ID NO:2n (wherein n=1 to 1051), yet differs in amino acid sequence due to natural allelic variation or mutagenesis, as described in detail below. Accordingly, in another embodiment, the ORFX protein is a protein that comprises an amino acid sequence at least about 45% homologous, and more preferably about 55, 65, 70, 75, 80, 85, 90, 95, 98 or even 99% homologous to the amino acid sequence of any of SEQ ID NO:2n (wherein n=1 to 1051) and retains the functional activity of the ORFX proteins of the corresponding polypeptide having the sequence of SEQ ID NO:2n (wherein n=1 to 1051).

[0107] Determining Homology between Two or More Sequences

[0108] To determine the percent homology of two amino acid sequences or of two nucleic acids, the sequences are aligned for optimal comparison purposes (e.g., gaps can be introduced in either of the sequences being compared for optimal alignment between the sequences). The amino acid residues or nucleotides at corresponding amino acid positions or nucleotide positions are then compared. When a position in the first sequence is occupied by the same amino acid residue or nucleotide as the corresponding position in the second sequence, then the molecules are homologous at that position (i.e., as used herein amino acid or nucleic acid “homology” is equivalent to amino acid or nucleic acid “identity”).

[0109] The nucleic acid sequence homology may be determined as the degree of identity between two sequences. The homology may be determined using computer programs known in the art, such as GAP software provided in the GCG program package. See, Needleman and Wunsch 1970 J Mol Biol 48: 443-453. Using GCG GAP software with the following settings for nucleic acid sequence comparison: GAP creation penalty of 5.0 and GAP extension penalty of 0.3, the coding region of the analogous nucleic acid sequences referred to above exhibits a degree of identity preferably of at least 70%, 75%, 80%, 85%, 90%, 95%, 98%, or 99%, with the CDS (encoding) part of the DNA sequence shown in SEQ ID NO:2n−1 (wherein n=1 to 1051).

[0110] The term “sequence identity” refers to the degree to which two polynucleotide or polypeptide sequences are identical on a residue-by-residue basis over a particular region of comparison. The term “percentage of sequence identity” is calculated by comparing two optimally aligned sequences over that region of comparison, determining the number of positions at which the identical nucleic acid base (e.g., A, T, C, G, U, or I, in the case of nucleic acids) occurs in both sequences to yield the number of matched positions, dividing the number of matched positions by the total number of positions in the region of comparison (i.e., the window size), and multiplying the result by 100 to yield the percentage of sequence identity. The term “substantial identity” as used herein denotes a characteristic of a polynucleotide sequence, wherein the polynucleotide comprises a sequence that has at least 80 percent sequence identity, preferably at least 85 percent identity and often 90 to 95 percent sequence identity, more usually at least 99 percent sequence identity as compared to a reference sequence over a comparison region. The term “percentage of positive residues” is calculated by comparing two optimally aligned sequences over that region of comparison, determining the number of positions at which the identical and conservative amino acid substitutions, as defined above, occur in both sequences to yield the number of matched positions, dividing the number of matched positions by the total number of positions in the region of comparison (i.e., the window size), and multiplying the result by 100 to yield the percentage of positive residues.

[0111] Chimeric and Fusion Proteins

[0112] The invention also provides ORFX chimeric or fusion proteins. As used herein, an ORFX “chimeric protein” or “fusion protein” includes an ORFX polypeptide operatively linked to a non-ORFX polypeptide. A “ORFX polypeptide” refers to a polypeptide having an amino acid sequence corresponding to ORFX, whereas a “non-ORFX polypeptide” refers to a polypeptide having an amino acid sequence corresponding to a protein that is not substantially homologous to the ORFX protein, e.g., a protein that is different from the ORFX protein and that is derived from the same or a different organism. Within an ORFX fusion protein the ORFX polypeptide can correspond to all or a portion of an ORFX protein. In one embodiment, an ORFX fusion protein comprises at least one biologically active portion of an ORFX protein. In another embodiment, an ORFX fusion protein comprises at least two biologically active portions of an ORFX protein. Within the fusion protein, the term “operatively linked” is intended to indicate that the ORFX polypeptide and the non-ORFX polypeptide are fused in-frame to each other. The non-ORFX polypeptide can be fused to the N-terminus or C-terminus of the ORFX polypeptide.

[0113] For example, in one embodiment an ORFX fusion protein comprises an ORFX polypeptide operably linked to the extracellular domain of a second protein. Such fusion proteins can be further utilized in screening assays for compounds that modulate ORFX activity (such assays are described in detail below).

[0114] In another embodiment, the fusion protein is a GST-ORFX fusion protein in which the ORFX sequences are fused to the C-terminus of the GST (i.e., glutathione S-transferase) sequences. Such fusion proteins can facilitate the purification of recombinant ORFX.

[0115] In yet another embodiment, the fusion protein is an ORFX protein containing a heterologous signal sequence at its N-terminus. For example, the native ORFX signal sequence can be removed and replaced with a signal sequence from another protein. In certain host cells (e.g., mammalian host cells), expression and/or secretion of ORFX can be increased through use of a heterologous signal sequence.

[0116] In another embodiment, the fusion protein is an ORFX-immunoglobulin fusion protein in which the ORFX sequences comprising one or more domains are fused to sequences derived from a member of the immunoglobulin protein family. The ORFX-immunoglobulin fusion proteins of the invention can be incorporated into pharmaceutical compositions and administered to a subject to inhibit an interaction between an ORFX ligand and an ORFX protein on the surface of a cell, to thereby suppress ORFX-mediated signal transduction in vivo. In one nonlimiting example, a contemplated ORFX ligand of the invention is an ORFX receptor. The ORFX-immunoglobulin fision proteins can be used to modulate the bioavailability of an ORFX cognate ligand. Inhibition of the ORFX ligand/ORFX interaction may be useful therapeutically for both the treatment of proliferative and differentiative disorders, as well as modulating (e.g., promoting or inhibiting) cell survival. Moreover, the ORFX-immunoglobulin fusion proteins of the invention can be used as immunogens to produce anti-ORFX antibodies in a subject, to purify ORFX ligands, and in screening assays to identify molecules that inhibit the interaction of ORFX with an ORFX ligand.

[0117] An ORFX chimeric or fusion protein of the invention can be produced by standard recombinant DNA techniques. For example, DNA fragments coding for the different polypeptide sequences are ligated together in-frame in accordance with conventional techniques, e.g., by employing blunt-ended or stagger-ended termini for ligation, restriction enzyme digestion to provide for appropriate termin, filling-in of cohesive ends as appropriate, alkaline phosphatase treatment to avoid undesirable joining, and enzymatic ligation. In another embodiment, the fusion gene can be synthesized by conventional techniques including automated DNA synthesizers. Alternatively, PCR amplification of gene fragments can be carried out using anchor primers that give rise to complementary overhangs between two consecutive gene fragments that can subsequently be annealed and reamplified to generate a chimeric gene sequence (see, for example, Ausubel et al (eds.) CURRENT PROTOCOLS IN MOLECULAR BIOLOGY, John Wiley & Sons, 1992). Moreover, many expression vectors are commercially available that already encode a fusion moiety (e.g., a GST polypeptide). An ORFX-encoding nucleic acid can be cloned into such an expression vector such that the fusion moiety is linked in-frame to the ORFX protein.

[0118] ORFX Agonists and Antagonists

[0119] The present invention also pertains to variants of the ORFX proteins that function as either ORFX agonists (mimetics) or as ORFX antagonists. Variants of the ORFX protein can be generated by mutagenesis, e.g., discrete point mutation or truncation of the ORFX protein. An agonist of the ORFX protein can retain substantially the same, or a subset of, the biological activities of the naturally occurring form of the ORFX protein. An antagonist of the ORFX protein can inhibit one or more of the activities of the naturally occurring form of the ORFX protein by, for example, competitively binding to a downstream or upstream member of a cellular signaling cascade which includes the ORFX protein. Thus, specific biological effects can be elicited by treatment with a variant of limited function. In one embodiment, treatment of a subject with a variant having a subset of the biological activities of the naturally occurring form of the protein has fewer side effects in a subject relative to treatment with the naturally occurring form of the ORFX proteins.

[0120] Variants of the ORFX protein that function as either ORFX agonists (mimetics) or as ORFX antagonists can be identified by screening combinatorial libraries of mutants, e.g., truncation mutants, of the ORFX protein for ORFX protein agonist or antagonist activity. In one embodiment, a variegated library of ORFX variants is generated by combinatorial mutagenesis at the nucleic acid level and is encoded by a variegated gene library. A variegated library of ORFX variants can be produced by, for example, enzymatically ligating a mixture of synthetic oligonucleotides into gene sequences such that a degenerate set of potential ORFX sequences is expressible as individual polypeptides, or alternatively, as a set of larger fusion proteins (e.g., for phage display) containing the set of ORFX sequences therein. There are a variety of methods which can be used to produce libraries of potential ORFX variants from a degenerate oligonucleotide sequence. Chemical synthesis of a degenerate gene sequence can be performed in an automatic DNA synthesizer, and the synthetic gene then ligated into an appropriate expression vector. Use of a degenerate set of genes allows for the provision, in one mixture, of all of the sequences encoding the desired set of potential ORFX sequences. Methods for synthesizing degenerate oligonucleotides are known in the art (see, e.g., Narang (1983) Tetrahedron 39:3; Itakura et al. (1984) Annu Rev Biochem 53:323; Itakura et al (1984) Science 198:1056; Ike et al. (1983) Nucl Acid Res 11:477.

[0121] Polypeptide Libraries

[0122] In addition, libraries of fragments of the ORFX protein coding sequence can be used to generate a variegated population of ORFX fragments for screening and subsequent selection of variants of an ORFX protein. In one embodiment, a library of coding sequence fragments can be generated by treating a double stranded PCR fragment of an ORFX coding sequence with a nuclease under conditions wherein nicking occurs only about once per molecule, denaturing the double stranded DNA, renaturing the DNA to form double stranded DNA that can include sense/antisense pairs from different nicked products, removing single stranded portions from reformed duplexes by treatment with S1 nuclease, and ligating the resulting fragment library into an expression vector. By this method, an expression library can be derived which encodes N-terminal and internal fragments of various sizes of the ORFX protein.

[0123] Several techniques are known in the art for screening gene products of combinatorial libraries made by point mutations or truncation, and for screening cDNA libraries for gene products having a selected property. Such techniques are adaptable for rapid screening of the gene libraries generated by the combinatorial mutagenesis of ORFX proteins. The most widely used techniques, which are amenable to high throughput analysis, for screening large gene libraries typically include cloning the gene library into replicable expression vectors, transforming appropriate cells with the resulting library of vectors, and expressing the combinatorial genes under conditions in which detection of a desired activity facilitates isolation of the vector encoding the gene whose product was detected. Recrusive ensemble mutagenesis (REM), a new technique that enhances the frequency of functional mutants in the libraries, can be used in combination with the screening assays to identify ORFX variants (Arkin and Yourvan (1992) PNAS 89:7811-7815; Delgrave et al. (1993) Protein Engineering 6:327-331).

[0124] Anti-ORFX Antibodies

[0125] The invention further encompasses antibodies and antibody fragments, such as Fab or (Fab)2. that bind immunospecifically to any of the proteins of the invention.

[0126] An isolated ORFX protein, or a portion or fragment thereof, can be used as an immunogen to generate antibodies that bind ORFX using standard techniques for polyclonal and monoclonal antibody preparation. Full-length ORFX protein can be used. Alternatively, the invention provides antigenic peptide fragments of ORFX for use as immunogens. The antigenic peptide of ORFX comprises at least 4 amino acid residues of the amino acid sequence shown in any of SEQ ID NO:2n (wherein n=1 to 1051). The antigenic peptide encompasses an epitope of ORFX such that an antibody raised against the peptide forms a specific immune complex with ORFX. The antigenic peptide may comprise at least 6 aa residues, at least 8 aa residues, at least 10 aa residues, at least 15 aa residues, at least 20 aa residues, or at least 30 aa residues. In one embodiment of the invention, the antigenic peptide comprises a polypeptide comprising at least 6 contiguous amino acids of any of SEQ ID NO:2n (wherein n=1 to 1051).

[0127] In an embodiment of the invention, epitopes encompassed by the antigenic peptide are regions of ORFX that are located on the surface of the protein, e.g., hydrophilic regions. As a means for targeting antibody production., hydropathy plots showing regions of hydrophilicity and hydrophobicity may be generated by any method well known in the art, including, for example, the Kyte Doolittle or the Hopp Woods methods, either with or without Fourier transformation. See, e.g., Hopp and Woods, 1981, Proc. Nat. Acad. Sci. USA 78: 3824-3828; Kyte and Doolittle 1982, J. Mol. Biol. 157: 105-142, each incorporated herein by reference in their entirety.

[0128] As disclosed herein, an ORFX protein sequence of any of SEQ ID NO:2n (wherein n=1 to 1051), or derivatives, fragments, analogs or homologs thereof, may be utilized as inununogens in the generation of antibodies that immunospecifically-bind these protein components. The term “antibody” as used herein refers to immunoglobulin molecules and immunologically active portions of immunoglobulin molecules, i.e., molecules that contain an antigen binding site that specifically binds (immunoreacts with) an antigen, such as ORFX. Such antibodies include, but are not limited to, polyclonal, monoclonal, chimeric, single chain, F_{ab} and F_{(ab)2} fragments, and an Fab expression library. In a specific embodiment, antibodies to human ORFX proteins are disclosed. Various procedures known within the art may be used for the production of polyclonal or monoclonal antibodies to an ORFX protein sequence of any of SEQ ID NO:2n (wherein n=1 to 1051) or derivative, fragment, analog or homolog thereof. Some of these proteins are discussed below.

[0129] For the production of polyclonal antibodies, various suitable host animals (e.g., rabbit, goat, mouse or other mammal) may be immunized by injection with the native protein, or a synthetic variant thereof, or a derivative of the foregoing. An appropriate immunogenic preparation can contain, for example, recombinantly expressed ORFX protein or a chemically synthesized ORFX polypeptide. The preparation can further include an adjuvant. Various adjuvants used to increase the immunological response include, but are not limited to, Freund's (complete and incomplete), mineral gels (e.g., aluminum hydroxide), surface active substances (e.g., lysolecithin, pluronic polyols, polyanions, peptides, oil emulsions, dinitrophenol, etc.), human adjuvants such as Bacille Calmette-Guerin and Corynebacterium parvum, or similar immunostimulatory agents. If desired, the antibody molecules directed against ORFX can be isolated from the mammal (e.g., from the blood) and further purified by well known techniques, such as protein A chromatography to obtain the IgG fraction.

[0130] The term “monoclonal antibody” or “monoclonal antibody composition”, as used herein, refers to a population of antibody molecules that contain only one species of an antigen binding site capable of immunoreacting with a particular epitope of ORFX. A monoclonal antibody composition thus typically displays a single binding affinity for a particular ORFX protein with which it immunoreacts. For preparation of monoclonal antibodies directed towards a particular ORFX protein, or derivatives, fragments, analogs or homologs thereof, any technique that provides for the production of antibody molecules by continuous cell line culture may be utilized. Such techniques include, but are not limited to, the hybridoma technique (see Kohler & Milstein, 1975 Nature 256: 495-497); the trioma technique; the human B-cell hybridoma technique (see Kozbor, et al., 1983 Immunol Today 4: 72) and the EBV hybridoma technique to produce human monoclonal antibodies (see Cole, et al., 1985 In: MONOCLONAL ANTIBODIES AND CANCER THERAPY, Alan R. Liss, Inc., pp. 77-96). Human monoclonal antibodies may be utilized in the practice of the present invention and may be produced by using human hybridomas (see Cote, et al., 1983. Proc Natl Acad Sci USA 80: 2026-2030) or by transforming human B-cells with Epstein Barr Virus in vitro (see Cole, et al, 1985 In: MONOCLONAL ANTIBODIES AND CANCER THERAPY, Alan R. Liss, Inc., pp. 77-96). Each of the above citations are incorporated herein by reference in their entirety

[0131] According to the invention, techniques can be adapted for the production of single-chain antibodies specific to an ORFX protein (see e.g., U.S. Pat. No. 4,946,778). In addition, methods can be adapted for the construction of Fab expression libraries (see e.g., Huse, et al. 1989 Science 246: 1275-1281) to allow rapid and effective identification of monoclonal Fab fragments with the desired specificity for an ORFX protein or derivatives, fragments, analogs or homologs thereof. Non-human antibodies can be “humanized” by techniques well known in the art. See e.g., U.S. Pat. No. 5,225,539. Each of the above citations are incorporated herein by reference. Antibody fragments that contain the idiotypes to an ORFX protein may be produced by techniques known in the art including, but not limited to: (i) an F_{(ab′)2} fragment produced by pepsin digestion of an antibody molecule; (ii) an F_{ab} fragment generated by reducing the disulfide bridges of an F_{(ab)2} fragment; (iii) an F_{ab} fragment generated by the treatment of the antibody molecule with papain and a reducing agent and (iv) Fᵥ fragments.

[0132] Additionally, recombinant anti-ORFX antibodies, such as chimeric and humanized monoclonal antibodies, comprising both human and non-human portions, which can be made using standard recombinant DNA techniques, are within the scope of the invention. Such chimeric and humanized monoclonal antibodies can be produced by recombinant DNA techniques known in the art, for example using methods described in PCT International Application No. PCT/US86/02269; European Patent Application No. 184,187; European Patent Application No. 171,496; European Patent Application No. 173,494; PCT International Publication No. WO 86/01533; U.S. Pat. No. 4,816,567; European Patent Application No. 125,023; Better et al.(1988) Science 240:1041-1043; Liu et al. (1987) PNAS 84:3439-3443; Liu et al. (1987) J Immunol. 139:3521-3526; Sun et al. (1987) PNAS 84:214-218; Nishimura et al. (1987) Cancer Res 47:999-1005; Wood et al. (1985) Nature 314:446-449; Shaw et al. (1988), J. Natl Cancer Inst 80:1553-1559); Morrison(1985) Science 229:1202-1207; Oi et al. (1986) BioTechniques 4:214; U.S. Pat. No. 5,225,539; Jones et al. (1986) Nature 321:552-525; Verhoeyan et al. (1988) Science 239:1534; and Beidler et al. (1988) J Immunol 141:4053-4060. Each of the above citations are incorporated herein by reference.

[0133] In one embodiment, methods for the screening of antibodies that possess the desired specificity include, but are not limited to, enzyme-linked immunosorbent assay (ELISA) and other immunologically-mediated techniques known within the art. In a specific embodiment, selection of antibodies that are specific to a particular domain of an ORFX protein is facilitated by generation of hybridomas that bind to the fragment of an ORFX protein possessing such a domain. Antibodies that are specific for one or more domains within an ORFX protein, e.g., the domain spanning the first fifty amino-terminal residues specific to ORFX when compared to FGF-9, or derivatives, fragments, analogs or homologs thereof, are also provided herein.

[0134] Anti-ORFX antibodies may be used in methods known within the art relating to the localization and/or quantitation of an ORFX protein (e.g., for use in measuring levels of the ORFX protein within appropriate physiological samples, for use in diagnostic methods, for use in imaging the protein, and the like). In a given embodiment, antibodies for ORFX proteins, or derivatives, fragments, analogs or homo logs thereof, that contain the antibody derived binding domain, are utilized as pharmacologically-active compounds [hereinafter “Therapeutics”].

[0135] An anti-ORFX antibody (e.g., monoclonal antibody) can be used to isolate ORFX by standard techniques, such as affinity chromatography or immunoprecipitation. An anti-ORFX antibody can facilitate the purification of natural ORFX from cells and of recombinantly produced ORFX expressed in host cells. Moreover, an anti-ORFX antibody can be used to detect ORFX protein (e.g., in a cellular lysate or cell supernatant) in order to evaluate the abundance and pattern of expression of the ORFX protein. Anti-ORFX antibodies can be used diagnostically to monitor protein levels in tissue as part of a clinical testing procedure, e.g., to, for example, determine the efficacy of a given treatment regimen. Detection can be facilitated by coupling (i.e., physically linking) the antibody to a detectable substance. Examples of detectable substances include various enzymes, prosthetic groups, fluorescent materials, luminescent materials, bioluminescent materials, and radioactive materials. Examples of suitable enzymes include horseradish peroxidase, alkaline phosphatase, β-galactosidase, or acetylcholinesterase; examples of suitable prosthetic group complexes include streptavidin/biotin and avidin/biotin; examples of suitable fluorescent materials include umbelliferone, fluorescein, fluorescein isothiocyanate, rhodamine, dichlorotriazinylamine fluorescein, dansyl chloride or phycoerythrin; an example of a luminescent material includes luminol; examples of bioluminescent materials include luciferase, luciferin, and aequorin, and examples of suitable radioactive material include ¹²⁵I, ¹³¹I, ³⁵S or ³H.

[0136] ORFX Recombinant Vectors and Host Cells

[0137] Another aspect of the invention pertains to vectors, preferably expression vectors, containing a nucleic acid encoding ORFX protein, or derivatives, fragments, analogs or homologs thereof. As used herein, the term “vector” refers to a nucleic acid molecule capable of transporting another nucleic acid to which it has been linked. One type of vector is a “plasmid”, which refers to a circular double stranded DNA loop into which additional DNA segments can be ligated. Another type of vector is a viral vector, wherein additional DNA segments can be ligated into the viral genome. Certain vectors are capable of autonomous replication in a host cell into which they are introduced (e.g., bacterial vectors having a bacterial origin of replication and episomal mammalian vectors). Other vectors (e.g., non-episomal mammalian vectors) are integrated into the genome of a host cell upon introduction into the host cell, and thereby are replicated along with the host genome. Moreover, certain vectors are capable of directing the expression of genes to which they are operatively linked. Such vectors are referred to herein as “expression vectors”. In general, expression vectors of utility in recombinant DNA techniques are often in the form of plasmids. In the present specification, “plasmid” and “vector” can be used interchangeably as the plasmid is the most commonly used form of vector. However, the invention is intended to include such other forms of expression vectors, such as viral vectors (e.g., replication defective retroviruses, adenoviruses and adeno-associated viruses), which serve equivalent functions.

[0138] The recombinant expression vectors of the invention comprise a nucleic acid of the invention in a form suitable for expression of the nucleic acid in a host cell, which means that the recombinant expression vectors include one or more regulatory sequences, selected on the basis of the host cells to be used for expression, that is operatively linked to the nucleic acid sequence to be expressed. Within a recombinant expression vector, “operably linked” is intended to mean that the nucleotide sequence of interest is linked to the regulatory sequence(s) in a manner that allows for expression of the nucleotide sequence (e.g., in an in vitro transcription/translation system or in a host cell when the vector is introduced into the host cell). The term “regulatory sequence” is intended to includes promoters, enhancers and other expression control elements (e.g., polyaclenylation signals). Such regulatory sequences are described, for example, in Goeddel; GENIE EXPRESSION TECHNOLOGY: METHODS IN ENZYMOLOGY 185, Academic Press, Sari Diego, Calif. (1990). Regulatory sequences include those that direct constitutive expression of a nucleotide sequence in many types of host cell and those that direct expression of the nucleotide sequence only in certain host cells (e.g., tissue-specific regulatory sequences). It will be appreciated by those skilled in the art that the design of the expression vector can depend on such factors as the choice of the host cell to be transformed, the level of expression of protein desired, etc. The expression vectors of the invention can be introduced into host cells to thereby produce proteins or peptides, including fusion proteins or peptides, encoded by nucleic acids as described herein (e.g., ORFX proteins, mutant forms of ORFX, fusion proteins, etc.).

[0139] The recombinant expression vectors of the invention can be designed for expression of ORFX in prokaryotic or eukaryotic cells. For example, ORFX can be expressed in bacterial cells such as E. Coli, insect cells (using baculovirus expression vectors) yeast cells or mammalian cells. Suitable host cells are discussed further in Goeddel, GENE EXPRESSION TECHNOLOGY: METHODS IN ENZYMOLOGY 185, Academic Press, San Diego, Calif. (1990). Alternatively, the recombinant expression vector can be transcribed and translated in vitro, for example using T7 promoter regulatory sequences and T7 polymerase.

[0140] Expression of proteins in prokaryotes is most often carried out in E. coli with vectors containing constitutive or inducible promoters directing the expression of either fusion or non-fusion proteins. Fusion vectors add a number of amino acids to a protein encoded therein, usually to the amino terminus of the recombinant protein. Such fusion vectors typically serve three purposes: (1) to increase expression of recombinant protein; (2) to increase the solubility of the recombinant protein; and (3) to aid in the purification of the recombinant protein by acting as a ligand in affinity purification. Often, in fusion expression vectors, a proteolytic cleavage site is introduced at the junction of the fusion moiety and the recombinant protein to enable separation of the recombinant protein from the fusion moiety subsequent to purification of the fusion protein. Such enzymes, and their cognate recognition sequences, include Factor Xa, thrombin and enterokinase. Typical fusion expression vectors include pGEX (Pharmacia Biotech Inc; Smith and Johnson (1988) Gene 67:31-40), pMAL (New England Biolabs, Beverly, Mass.) and pRIT5 (Pharmacia, Piscataway, N.J.) that fuse glutathione S-transferase (GST), maltose E binding protein, or protein A, respectively, to the target recombinant protein.

[0141] Examples of suitable inducible non-fusion E. coli expression vectors include pTrc (Amrann et al., (1988) Gene 69:301-315) and pET 11d (Studier et al., GENE EXPRESSION TECHNOLOGY: METHODS IN ENZYMOLOGY 185, Academic Press, San Diego, Calif. (1990) 60-89).

[0142] One strategy to maximize recombinant protein expression in E. coli is to express the protein in a host bacteria with an impaired capacity to proteolytically cleave the recombinant protein. See, Gottesman, GENE EXPRESSION TECHNOLOGY: METHODS IN ENZYMOLOGY 185, Academic Press, San Diego, Calif. (1990) 119-128. Another strategy is to alter the nucleic acid sequence of the nucleic acid to be inserted into an expression vector so that the individual codons for each amino acid are those preferentially utilized in E. coli (Wada et al., (1992) Nucleic Acids Res. 20:2111-2118). Such alteration of nucleic acid sequences of the invention can be carried out by standard DNA synthesis techniques.

[0143] In another embodiment, the ORFX expression vector is a yeast expression vector. Examples of vectors for expression in yeast S. cerivisae include pYepSecl (Baldari, et al., (1987) EMBO J 6:229-234), pMFa (Kurjan and Herskowitz, (1982) Cell 30:933-943), pJRY88 (Schultz et al., (1987) Gene 54:113-123), pYES2 (Invitrogen Corporation, San Diego, Calif.), and picZ (In Vitrogen Corp, San Diego, Calif.).

[0144] Alternatively, ORFX can be expressed in insect cells using baculovirus expression vectors. Baculovirus vectors available for expression of proteins in cultured insect cells (e.g., SF9 cells) include the pAc series (Smith et al. (1983) Mol Cell Biol 3:2156-2165) and the pVL series (Lucklow and Summers (1989) Virology 170:31-39).

[0145] In yet another embodiment, a nucleic acid of the invention is expressed in mammalian cells using a mammalian expression vector. Examples of mammalian expression vectors include pCDM8 (Seed (1987) Nature 329:840) and pMT2PC (Kaufman et al. (1987) EMBO J 6: 187-195). When used in mammalian cells, the expression vector's control functions are often provided by viral regulatory elements. For example, commonly used promoters are derived from polyoma, Adenovirus 2, cytomegalovirus and Simian Virus 40. For other suitable expression systems for both prokaryotic and eukaryotic cells. See, e.g., Chapters 16 and 17 of Sambrook et al., MOLECULAR CLONING: A LABORATORY MANUAL. 2nd ed., Cold Spring Harbor Laboratory, Cold Spring Harbor Laboratory Press, Cold Spring Harbor, N.Y., 1989.

[0146] In another embodiment, the recombinant mammalian expression vector is capable of directing expression of the nucleic acid preferentially in a particular cell type (e.g., tissue-specific regulatory elements are used to express the nucleic acid). Tissue-specific regulatory elements are known in the art. Non-limiting examples of suitable tissue-specific promoters include the albumin promoter (liver-specific; Pinkert et al. (1987) Genes Dev 1:268-277), lymphoid-specific promoters (Calame and Eaton (1988) Adv Immunol 43 :235-275), in particular promoters of T cell receptors (Winoto and Baltimore (1989) EMBO J8:729-733) and immunoglobulins (Banerji et al. (1983) Cell 33 :729-740; Queen and Baltimore (1983) Cell 33:741-748), neuron-specific promoters (e.g., the neurofilament promoter; Byrne and Ruddle (1989) PANS 86:5473-5477), pancreas-specific promoters (Edlund et al. (1985) Science 230:912-916), and mammary gland-specific promoters (e.g., milk whey promoter; U.S. Pat. No. 4,873,316 and European Application Publication No. 264,166). Developmentally-regulated promoters are also encompassed, e.g., the murine hox promoters (Kessel and Gruss (1990) Science 249:374-379) and the oe-fetoprotein promoter (Campes and Tilghman (1989) Genes Dev 3:537-546).

[0147] The invention further provides a recombinant expression vector comprising a DNA molecule of the invention cloned into the expression vector in an antisense orientation. That is, the DNA molecule is operatively linked to a regulatory sequence in a manner that allows for expression (by transcription of the DNA molecule) of an RNA molecule that is antisense to ORFX mRNA. Regulatory sequences operatively linked to a nucleic acid cloned in the antisense orientation can be chosen that direct the continuous expression of the antisense RNA molecule in a variety of cell types, for instance viral promoters and/or enhancers, or regulatory sequences can be chosen that direct constitutive, tissue specific or cell type specific expression of antisense RNA. The antisense expression vector can be in the form of a recombinant plasmid, phagemid or attenuated virus in which antisense nucleic acids are produced under the control of a high efficiency regulatory region, the activity of which can be determined by the cell type into which the vector is introduced. For a discussion of the regulation of gene expression using antisense genes see Weintraub et al., “Antisense RNA as a molecular tool for genetic analysis,” Reviews—Trends in Genetics, Vol. 1(1) 1986.

[0148] Another aspect of the invention pertains to host cells into which a recombinant expression vector of the invention has been introduced. The terms “host cell” and “recombinant host cell” are used interchangeably herein. It is understood that such terms refer not only to the particular subject cell but to the progeny or potential progeny of such a cell. Because certain modifications may occur in succeeding generations due to either mutation or environmental influences, such progeny may not, in fact, be identical to the parent cell, but are still included within the scope of the term as used herein.

[0149] A host cell can be any prokaryotic or eukaryotic cell. For example, ORFX protein can be expressed in bacterial cells such as E. coli, insect cells, yeast or mammalian cells (such as Chinese hamster ovary cells (CHO) or COS cells). Other suitable host cells are known to those skilled in the art.

[0150] Vector DNA can be introduced into prokaryotic or eukaryotic cells via conventional transformation or transfection techniques. As used herein, the terms “transformation” and “transfection” are intended to refer to a variety of art-recognized techniques for introducing foreign nucleic acid (e.g., DNA) into a host cell, including calcium phosphate or calcium chloride co-precipitation, DEAE-dextran-mediated transfection, lipofection, or electroporation. Suitable methods for transforming or transfecting host cells can be found in Sambrook, et al. (MOLECULAR CLONING: A LABORATORY MANUAL. 2nd ed., Cold Spring Harbor Laboratory, Cold Spring Harbor Laboratory Press, Cold Spring Harbor, N.Y., 1989), and other laboratory manuals.

[0151] For stable transfection of mammalian cells, it is known that, depending upon the expression vector and transfection technique used, only a small fraction of cells may integrate the foreign DNA into their genome. In order to identify and select these integrants, a gene that encodes a selectable marker (e.g., resistance to antibiotics) is generally introduced into the host cells along with the gene of interest. Various selectable markers include those that confer resistance to drugs, such as G418, hygromycin and methotrexate. Nucleic acid encoding a selectable marker can be introduced into a host cell on the same vector as that encoding ORFX or can be introduced on a separate vector. Cells stably transfected with the introduced nucleic acid can be identified by drug selection (e.g., cells that have incorporated the selectable marker gene will survive, while the other cells die).

[0152] A host cell of the invention, such as a prokaryotic or eukaryotic host cell in culture, can be used to produce (i.e., express) ORFX protein. Accordingly, the invention further provides methods for producing ORFX protein using the host cells of the invention. In one embodiment, the method comprises culturing the host cell of invention (into which a recombinant expression vector encoding ORFX has been introduced) in a suitable medium such that ORFX protein is produced. In another embodiment, the method further comprises isolating ORFX from the medium or the host cell.

[0153] Transgenic Animals

[0154] The host cells of the invention can also be used to produce nonhuman transgenic animals. For example, in one embodiment, a host cell of the invention is a fertilized oocvte or an embryonic stem cell into which ORFX-coding sequences have been introduced. Such host cells can then be used to create non-human transgenic animals in which exogenous ORFX sequences have been introduced into their genome or homologous recombinant animals in which endogenous ORFX sequences have been altered. Such animals are useful for studying the function and/or activity of ORFX and for identifying and/or evaluating modulators of ORFX activity. As used herein, a “transgenic animal” is a non-human animal, preferably a mammal, more preferably a rodent such as a rat or mouse, in which one or more of the cells of the animal includes a transgene. Other examples of transgenic animals include non-human primates, sheep, dogs, cows, goats, chickens, amphibians, etc. A transgene is exogenous DNA that is integrated into the genome of a cell from which a transgenic animal develops and that remains in the genome of the mature animal, thereby directing the expression of an encoded gene product in one or more cell types or tissues of the transgenic animal. As used herein, a “homologous recombinant animal” is a non-human animal, preferably a mammal, more preferably a mouse, in which an endogenous ORFX gene has been altered by homologous recombination between the endogenous gene and an exogenous DNA molecule introduced into a cell of the animal, e.g., an embryonic cell of the animal, prior to development of the animal.

[0155] A transgenic animal of the invention can be created by introducing ORFX-encoding nucleic acid into the male pronuclei of a fertilized oocyte, e.g., by microinjection, retroviral infection, and allowing the oocyte to develop in a pseudopregnant female foster animal. The human ORFX DNA sequence of SEQ ID NO:2n−1 (wherein n=1 to 1051) can be introduced as a transgene into the genome of a nonhuman animal. Alternatively, a nonhuman homologue of the human ORFX gene, such as a mouse ORFX gene, can be isolated based on hybridization to the human ORFX CDNA (described further above) and used as a transgene. Intronic sequences and polyadenylation signals can also be included in the transgene to increase the efficiency of expression of the transgene. A tissue-specific regulatory sequence(s) can be operably linked to the ORFX transgene to direct expression of ORFX protein to particular cells. Methods for generating transgenic animals via embryo manipulation and microinjection, particularly animals such as mice, have become conventional in the art and are described, for example, in U.S. Pat. Nos. 4,736,866; 4,870,009; and 4,873,191; and Hogan 1986, In: MANIPULATING THE MOUSE EMBRYO, Cold Spring Harbor Laboratory Press, Cold Spring Harbor, N.Y. Similar methods are used for production of other transgenic animals. A transgenic founder animal can be identified based upon the presence of the ORFX transgene in its genome and/or expression of ORFX mRNA in tissues or cells of the animals. A transgenic founder animal can then be used to breed additional animals carrying the transgene. Moreover, transgenic animals carrying a transgene encoding ORFX can further be bred to other transgenic animals carrying other transgenes.

[0156] To create a homologous recombinant animal, a vector is prepared which contains at least a portion of an ORFX gene into which a deletion, addition or substitution has been introduced to thereby alter, e.g., functionally disrupt, the ORFX gene. The ORFX gene can be a human gene (e.g., SEQ ID NO:2n−1 (wherein n=1 to 1051)), but more preferably, is a non-human homologue of a human ORFX gene. For example, a mouse homologue of human ORFX gene of SEQ ID NO:2n−1 (wherein n=1 to 1051) can be used to construct a homologous recombination vector suitable for altering an endogenous ORFX gene in the mouse genome. In one embodiment, the vector is designed such that, upon homologous recombination, the endogenous ORFX gene is functionally disrupted (i e., no longer encodes a functional protein; also referred to as a “knock out” vector).

[0157] Alternatively, the vector can be designed such that, upon homologous recombination, the endogenous ORFX gene is mutated or otherwise altered but still encodes functional protein (e.g., the upstream regulatory region can be altered to thereby alter the expression of the endogenous ORFX protein). In the homologous recombination vector, the altered portion of the ORFX gene is flanked at its 5′ and 3′ ends by additional nucleic acid of the ORFX gene to allow for homologous recombination to occur between the exogenous ORFX gene carried by the vector and an endogenous ORFX gene in an embryonic stem cell. The additional flanking ORFX nucleic acid is of sufficient length for successful homologous recombination with the endogenous gene. Typically, several kilobases of flanking DNA (both at the 5′ and 3′ ends) are included in the vector. See e.g., Thomas et al. (1987) Cell 51:503 for a description of homologous recombination vectors. The vector is introduced into an embryonic stem cell line (eg., by electroporation) and cells in which the introduced ORFX gene has homologously recombined with the endogenous ORFX gene are selected (see e.g., Li et al. (1992) Cell 69:915).

[0158] The selected cells are then injected into a blastocyst of an animal (e.g., a mouse) to form aggregation chimeras. See e.g., Bradley 1987, In: TERATOCARCINOMAS AND EMBRYONIC STEM CELLS: A PRACTICAL APPROACH, Robertson, ed. IRL, Oxford, pp. 113-152. A chimeric embryo can then be implanted into a suitable pseudopregnant female foster animal and the embryo brought to term. Progeny harboring the homologously recombined DNA in their germ cells can be used to breed animals in which all cells of the animal contain the homologously recombined DNA by germline transmission of the transgene. Methods for constructing homologous recombination vectors and homologous recombinant animals are described further in Bradley (1991) Curr Opin Biotechnol 2:823-829; PCT International Publication Nos.: WO 90/11354; WO 91/01140; WO 92/0968; and WO 93/04169.

[0159] In another embodiment, transgenic non-humans animals can be produced that contain selected systems that allow for regulated expression of the transgene. One example of such a system is the cre/loxP recombinase system of bacteriophage P1. For a description of the cre/loxP recombinase system, see, e.g., Lakso et al. (1992) PNAS 89:6232-6236. Another example of a recombinase system is the FLP recombinase system of Saccharomyces cerevisiae (O'Gorman et al. (1991) Science 251:1351-1355. If a cre/loxP recombinase system is used to regulate expression of the transgene, animals containing transgenes encoding both the Cre recombinase and a selected protein are required. Such animals can be provided through the construction of “double” transgenic animals, e.g., by mating two transgenic animals, one containing a transgene encoding a selected protein and the other containing a transgene encoding a recombinase.

[0160] Clones of the non-human transgenic animals described herein can also be produced according to the methods described in Wilmut et al. (1997) Nature 385:810-813. In brief, a cell, e.g., a somatic cell, from the transgenic animal can be isolated and induced to exit the growth cycle and enter Go phase. The quiescent cell can then be fused, e.g., through the use of electrical pulses, to an enucleated oocyte from an animal of the same species from which the quiescent cell is isolated. The reconstructed oocyte is then cultured such that it develops to morula or blastocyte and then transferred to pseudopregnant female foster animal. The offspring borne of this female foster animal will be a clone of the animal from which the cell, e.g., the somatic cell, is isolated.

[0161] Pharmaceutical Compositions

[0162] The ORFX nucleic acid molecules, ORFX proteins, and anti-ORFX antibodies (also referred to herein as “active compounds”) of the invention, and derivatives, fragments, analogs and homologs thereof, can be incorporated into pharmaceutical compositions suitable for administration. Such compositions typically comprise the nucleic acid molecule, protein, or antibody and a pharmaceutically acceptable carrier. As used herein, “pharmaceutically acceptable carrier” is intended to include any and all solvents, dispersion media, coatings, antibacterial and antifungal agents, isotonic and absorption delaying agents, and the like, compatible with pharmaceutical administration. Suitable carriers are described in the most recent edition of Remington's Pharmaceutical Sciences, a standard reference text in the field, which is incorporated herein by reference. Preferred examples of such carriers or diluents include, but are not limited to, water, saline, finger's solutions, dextrose solution, and 5% human serum albumin. Liposomes and non-aqueous vehicles such as fixed oils may also be used. The use of such media and agents for pharmaceutically active substances is well known in the art. Except insofar as any conventional media or agent is incompatible with the active compound, use thereof in the compositions is contemplated. Supplementary active compounds can also be incorporated into the compositions.

[0163] A pharmaceutical composition of the invention is formulated to be compatible with its intended route of administration. Examples of routes of administration include parenteral, e.g., intravenous, intradermal, subcutaneous, oral (e.g., inhalation), transdermal (topical), transmucosal, and rectal administration. Solutions or suspensions used for parenteral, intradermal, or subcutaneous application can include the following components: a sterile diluent such as water for injection, saline solution, fixed oils, polyethylene glycols, glycerine, propylene glycol or other synthetic solvents; antibacterial agents such as benzyl alcohol or methyl parabens; antioxidants such as ascorbic acid or sodium bisulfite; chelating agents such as ethylenediaminetetraacetic acid; buffers such as acetates, citrates or phosphates, and agents for the adjustment of tonicity such as sodium chloride or dextrose. The pH can be adjusted with acids or bases, such as hydrochloric acid or sodium hydroxide. The parenteral preparation can be enclosed in ampoules, disposable syringes or multiple dose vials made of glass or plastic.

[0164] Pharmaceutical compositions suitable for injectable use include sterile aqueous solutions (where water soluble) or dispersions and sterile powders for the extemporaneous preparation of sterile injectable solutions or dispersion. For intravenous administration, suitable carriers include physiological saline, bacteriostatic water, Cremophor EL™ (BASF, Parsippany, N.J.) or phosphate buffered saline (PBS). In all cases, the composition must be sterile and should be fluid to the extent that easy syringeability exists. It must be stable under the conditions of manufacture and storage and must be preserved against the contaminating action of microorganisms such as bacteria and fungi. The carrier can be a solvent or dispersion medium containing, for example, water, ethanol, polyol (for example, glycerol, propylene glycol, and liquid polyethylene glycol, and the like), and suitable mixtures thereof. The proper fluidity can be maintained, for example, by the use of a coating such as lecithin, by the maintenance of the required particle size in the case of dispersion and by the use of surfactants. Prevention of the action of microorganisms can be achieved by various antibacterial and antifungal agents, for example, parabens, chlorobutanol, phenol, ascorbic acid, thimerosal, and the like. In many cases, it will be preferable to include isotonic agents, for example, sugars, polyalcohols such as manitol, sorbitol, sodium chloride in the composition. Prolonged absorption of the injectable compositions can be brought about by including in the composition an agent which delays absorption, for example, aluminum monostearate and gelatin.

[0165] Sterile injectable solutions can be prepared by incorporating the active compound (e g, an ORFX protein or anti-ORFX antibody) in the required amount in an appropriate solvent with one or a combination of ingredients enumerated above, as required, followed by filtered sterilization. Generally, dispersions are prepared by incorporating the active compound into a sterile vehicle that contains a basic dispersion medium and the required other ingredients from those enumerated above. In the case of sterile powders for the preparation of sterile injectable solutions, methods of preparation are vacuum drying and freeze-drying that yields a powder of the active ingredient plus any additional desired ingredient from a previously sterile-filtered solution thereof.

[0166] Oral compositions generally include an inert diluent or an edible carrier. They can be enclosed in gelatin capsules or compressed into tablets. For the purpose of oral therapeutic administration, the active compound can be incorporated with excipients and used in the form of tablets, troches, or capsules. Oral compositions can also be prepared using a fluid carrier for use as a mouthwash, wherein the compound in the fluid carrier is applied orally and swished and expectorated or swallowed. Pharmaceutically compatible binding agents, and/or adjuvant materials can be included as part of the composition. The tablets, pills, capsules, troches and the like can contain any of the following ingredients, or compounds of a similar nature: a binder such as microcrystalline cellulose, gum tragacanth or gelatin; an excipient such as starch or lactose, a disintegrating agent such as alginic acid, Primogel, or corn starch; a lubricant such as magnesium stearate or Sterotes; a glidant such as colloidal silicon dioxide; a sweetening agent such as sucrose or saccharin; or a flavoring agent such as peppermint, methyl salicylate, or orange flavoring.

[0167] For administration by inhalation, the compounds are delivered in the form of an aerosol spray from pressured container or dispenser which contains a suitable propellant, e.g., a gas such as carbon dioxide, or a nebulizer.

[0168] Systemic administration can also be by transmucosal or transdermal means. For transmucosal or transdermal administration, penetrants appropriate to the barrier to be permeated are used in the formulation. Such penetrants are generally known in the art, and include, for example, for transmucosal administration, detergents, bile salts, and fusidic acid derivatives. Transmucosal administration can be accomplished through the use of nasal sprays or suppositories. For transdermal administration, the active compounds are formulated into ointments, salves, gels, or creams as generally known in the art.

[0169] The compounds can also be prepared in the form of suppositories (e.g., with conventional suppository bases such as cocoa butter and other glycerides) or retention enemas for rectal delivery.

[0170] In one embodiment, the active compounds are prepared with carriers that will protect the compound against rapid elimination from the body, such as a controlled release formulation, including implants and microencapsulated delivery systems. Biodegradable, biocompatible polymers can be used, such as ethylene vinyl acetate, polyanhydrides, polyglycolic acid, collagen, polyorthoesters, and polylactic acid. Methods for preparation of such formulations will be apparent to those skilled in the art. The materials can also be obtained commercially from Alza Corporation and Nova Pharmaceuticals, Inc. Liposomal suspensions (including liposomes targeted to infected cells with monoclonal antibodies to viral antigens) can also be used as pharmaceutically acceptable carriers. These can be prepared according to methods known to those skilled in the art, for example, as described in U.S. Pat. No. 4,522,811.

[0171] It is especially advantageous to formulate oral or parenteral compositions in dosage unit form for ease of administration and uniformity of dosage. Dosage unit form as used herein refers to physically discrete units suited as unitary dosages for the subject to be treated; each unit containing a predetermined quantity of active compound calculated to produce the desired therapeutic effect in association with the required pharmaceutical carrier. The specification for the dosage unit forms of the invention are dictated by and directly dependent on the unique characteristics of the active compound and the particular therapeutic effect to be achieved.

[0172] The nucleic acid molecules of the invention can be inserted into vectors and used as gene therapy vectors. Gene therapy vectors can be delivered to a subject by any of a number of routes, e.g., as described in U.S. Pat. Nos. 5,703,055. Delivery can thus also include, e.g., intravenous injection, local administration (see U.S. Pat. No. 5,328,470) or stereotactic injection (see e.g., Chen et al. (1994) PNAS 91:3054-3057). The pharmaceutical preparation of the gene therapy vector can include the gene therapy vector in an acceptable diluent, or can comprise a slow release matrix in which the gene delivery vehicle is imbedded. Alternatively, where the complete gene delivery vector can be produced intact from recombinant cells, e.g., retroviral vectors, the pharmaceutical preparation can include one or more cells that produce the gene delivery system.

[0173] The pharmaceutical compositions can be included in a container, pack, or dispenser together with instructions for administration.

[0174] Additional uses and Methods of the Invention

[0175] The nucleic acid molecules, proteins, protein homologues, and antibodies described herein can be used in one or more of the following methods: (a) screening assays; (b) detection assays (e.g., chromosomal mapping, cell and tissue typing, forensic biology), (c) predictive medicine (e.g., diagnostic assays, prognostic assays, monitoring clinical trials, and pharmacogenomics); and (d) methods of treatment (e.g., therapeutic and prophylactic).

[0176] The isolated nucleic acid molecules of the invention can be used to express ORFX protein (e.g., via a recombinant expression vector in a host cell in gene therapy applications), to detect ORFX mRNA (e.g., in a biological sample) or a genetic lesion in an ORFX gene, and to modulate ORFX activity, as described further below. In addition, the ORFX proteins can be used to screen drugs or compounds that modulate the ORFX activity or expression as well as to treat disorders characterized by insufficient or excessive production of ORFX protein, for example proliferative or differentiative disorders, or production of ORFX protein forms that have decreased or aberrant activity compared to ORFX wild type protein. In addition, the anti-ORFX antibodies of the invention can be used to detect and isolate ORFX proteins and modulate ORFX activity.

[0177] This invention further pertains to novel agents identified by the above described screening assays and uses thereof for treatments as described herein.

[0178] Screening Assays

[0179] The invention provides a method (also referred to herein as a “screening assay”) for identifying modulators, i.e., candidate or test compounds or agents (e g., peptides, peptidomimetics, small molecules or other drugs) that bind to ORFX proteins or have a stimulatory or inhibitory effect on, for example, ORFX expression or ORFX activity.

[0180] In one embodiment, the invention provides assays for screening candidate or test compounds which bind to or modulate the activity of an ORFX protein or polypeptide or biologically active portion thereof. The test compounds of the present invention can be obtained using any of the numerous approaches in combinatorial library methods known in the art, including: biological libraries; spatially addressable parallel solid phase or solution phase libraries; synthetic library methods requiring deconvolution; the “one-bead one-compound” library method; and synthetic library methods using affinity chromatography selection. The biological library approach is limited to peptide libraries, while the other four approaches are applicable to peptide, non-peptide oligomer or small molecule libraries of compounds (Lam (1997) Anticancer Drug Des 12:145).

[0181] Examples of methods for the synthesis of molecular libraries can be found in the art, for example in: DeWitt et al. (1993) Proc Natl Acad Sci U.S.A. 90:6909; Erb et al. (1994) Proc Natl Acad Sci U.S.A. 91:11422; Zuckermann et al. (1994) J Med Chem 37:2678; Cho et al. (1993) Science 261:1303; Carrell et al. (1994) Angew Chem Int Ed Engl 33:2059; Carell et al. (1994) Angew Chem Int Ed Engl 33:2061; and Gallop et al. (1994) J Med Chem 37:1233.

[0182] Libraries of compounds may be presented in solution (e.g., Houghten (1992) Biotechniques 13412-421), or on beads (Lam (1991) Nature 354:82-84), on chips (Fodor (1993) Nature 364:555-556), bacteria (Ladner U.S. Pat. No. 5,223,409), spores (Ladner U.S. Pat. No. '409), plasmids (Cull et al. (1992) Proc Natl Acad Sci USA 89:1865-1869) or on phage (Scott and Smith (1990) Science 249: 386-390; Devlin (1990) Science 249:404-406; Cwirla et al (1990) Proc Natl Acad Sci U.S.A. 87:6378-6382; Felici (1991) J Mol Biol 222:301-310; Ladner above.).

[0183] In one embodiment, an assay is a cell-based assay in which a cell which expresses a membrane-bound form of ORFX protein., or a biologically active portion thereof, on the cell surface is contacted with a test compound and the ability of the test compound to bind to an ORFX protein determined. The cell, for example, can of mammalian origin or a yeast cell. Determining the ability of the test compound to bind to the ORFX protein can be accomplished, for example, by coupling the test compound with a radioisotope or enzymatic label such that binding of the test compound to the ORFX protein or biologically active portion thereof can be determined by detecting the labeled compound in a complex. For example, test compounds can be labeled with ¹²⁵I, ³⁵S, ¹⁴C, or ³H, either directly or indirectly, and the radioisotope detected by direct counting of radioemission or by scintillation counting. Alternatively, test compounds can be enzymatically labeled with, for example, horseradish peroxidase, alkaline phosphatase, or luciferase, and the enzymatic label detected by determination of conversion of an appropriate substrate to product. In one embodiment, the assay comprises contacting a cell which expresses a membrane-bound form of ORFX protein, or a biologically active portion thereof, on the cell surface with a known compound which binds ORFX to form an assay mixture, contacting the assay mixture with a test compound, and determining the ability of the test compound to interact with an ORFX protein, wherein determining the ability of the test compound to interact with an ORFX protein comprises determining the ability of the test compound to preferentially bind to ORFX or a biologically active portion thereof as compared to the known compound.

[0184] In another embodiment, an assay is a cell-based assay comprising contacting a cell expressing a membrane-bound form of ORFX protein, or a biologically active portion thereof, on the cell surface with a test compound and determining the ability of the test compound to modulate (e.g., stimulate or inhibit) the activity of the ORFX protein or biologically active portion thereof. Determining the ability of the test compound to modulate the activity of ORFX or a biologically active portion thereof can be accomplished, for example, by determining the ability of the ORFX protein to bind to or interact with an ORFX target molecule. As used herein, a “target molecule” is a molecule with which an ORFX protein binds or interacts in nature, for example, a molecule on the surface of a cell which expresses an ORFX interacting protein, a molecule on the surface of a second cell, a molecule in the extracellular milieu, a molecule associated with the internal surface of a cell membrane or a cytoplasmic molecule. An ORFX target molecule can be a non-ORFX molecule or an ORFX protein or polypeptide of the present invention. In one embodiment, an ORFX target molecule is a component of a signal transduction pathway that facilitates transduction of an extracellular signal (e.g., a signal generated by binding of a compound to a membrane-bound ORFX molecule) through the cell membrane and into the cell. The target, for example, can be a second intercellular protein that has catalytic activity or a protein that facilitates the association of downstream signaling molecules with ORFX.

[0185] Determining the ability of the ORFX protein to bind to or interact with an ORFX target molecule can be accomplished by one of the methods described above for determining direct binding. In one embodiment, determining the ability of the ORFX protein to bind to or interact with an ORFX target molecule can be accomplished by determining the activity of the target molecule. For example, the activity of the target molecule can be determined by detecting induction of a cellular second messenger of the target (i.e. intracellular Ca²⁺, diacylglycerol, IP₃, etc.), detecting catalytic/enzymatic activity of the target an appropriate substrate, detecting the induction of a reporter gene (comprising an ORFX-responsive regulatory element operatively linked to a nucleic acid encoding a detectable marker, e.g., luciferase), or detecting a cellular response, for example, cell survival, cellular differentiation, or cell proliferation.

[0186] In yet another embodiment, an assay of the present invention is a cell-free assay comprising contacting an ORFX protein or biologically active portion thereof with a test compound and determining the ability of the test compound to bind to the ORFX protein or biologically active portion thereof. Binding of the test compound to the ORFX protein can be determined either directly or indirectly as described above. In one embodiment, the assay comprises contacting the ORFX protein or biologically active portion thereof with a known compound which binds ORFX to form an assay mixture, contacting the assay mixture with a test compound, and determining the ability of the test compound to interact with an ORFX protein, wherein determining the ability of the test compound to interact with an ORFX protein comprises determining the ability of the test compound to preferentially bind to ORFX or biologically active portion thereof as compared to the known compound.

[0187] In another embodiment, an assay is a cell-free assay comprising contacting ORFX protein or biologically active portion thereof with a test compound and determining the ability of the test compound to modulate (e.g., stimulate or inhibit) the activity of the ORFX protein or biologically active portion thereof. Determining the ability of the test compound to modulate the activity of ORFX can be accomplished, for example, by determining the ability of the ORFX protein to bind to an ORFX target molecule by one of the methods described above for determining direct binding. In an alternative embodiment, determining the ability of the test compound to modulate the activity of ORFX can be accomplished by determining the ability of the ORFX protein further modulate an ORFX target molecule. For example, the catalytic/enzymatic activity of the target molecule on an appropriate substrate can be determined as previously described.

[0188] In yet another embodiment, the cell-free assay comprises contacting the ORFX protein or biologically active portion thereof with a known compound which binds ORFX to form an assay mixture, contacting the assay mixture with a test compound, and determining the ability of the test compound to interact with an ORFX protein, wherein determining the ability of the test compound to interact with an ORFX protein comprises determining the ability of the ORFX protein to preferentially bind to or modulate the activity of an ORFX target molecule.

[0189] The cell-free assays of the present invention are amenable to use of both the soluble form or the membrane-bound form of ORFX. In the case of cell-free assays comprising the membrane-bound form of ORFX, it may be desirable to utilize a solubilizing agent such that the membrane-bound form of ORFX is maintained in solution. Examples of such solubilizing agents include non-ionic detergents such as n-octylglucoside, n-dodecylglucoside, n-dodecylmaltoside, octanoyl-N-methylglucamide, decanoyl-N-methylglucamide, Triton® X-100, Triton® X-14, Thesit®, Isotridecypoly(ethylene glycol ether)ₙ, N-dodecyl—N,N-dimethyl-3-ammonio-1-propane sulfonate, 3-(3-cholamidopropyl)dimethylamminiol-1-propane sulfonate (CHAPS), or 3-(3-cholamidopropyl)dimethylamminiol-2-hydroxy-1-propane sulfonate (CHAPSO).

[0190] In more than one embodiment of the above assay methods of the present invention, it may be desirable to immobilize either ORFX or its target molecule to facilitate separation of complexed from uncomplexed forms of one or both of the proteins, as well as to accommodate automation of the assay. Binding of a test compound to ORFX, or interaction of ORFX with a target molecule in the presence and absence of a candidate compound, can be accomplished in any vessel suitable for containing the reactants. Examples of such vessels include microtiter plates, test tubes, and micro-centrifuge tubes. In one embodiment, a fusion protein can be provided that adds a domain that allows one or both of the proteins to be bound to a matrix. For example, GST-ORFX fusion proteins or GST-target fusion proteins can be adsorbed onto glutathione sepharose beads (Sigma Chemical, St. Louis, Mo.) or glutathione derivatized microtiter plates, that are then combined with the test compound or the test compound and either the non-adsorbed target protein or ORFX protein, and the mixture is incubated under conditions conducive to complex formation (e.g., at physiological conditions for salt and pH). Following incubation, the beads or microtiter plate wells are washed to remove any unbound components, the matrix immobilized in the case of beads, complex determined either directly or indirectly, for example, as described above. Alternatively, the complexes can be dissociated from the matrix, and the level of ORFX binding or activity determined using standard techniques.

[0191] Other techniques for immobilizing proteins on matrices can also be used in the screening assays of the invention. For example, either ORFX or its target molecule can be immobilized utilizing conjugation of biotin and streptavidin. Biotinylated ORFX or target molecules can be prepared from biotin-NHS (N-hydroxy-succinimide) using techniques well known in the art (e.g. biotinylation kit, Pierce Chemicals, Rockford, Ill.), and immobilized in the wells of streptavidin-coated 96 well plates (Pierce Chemical). Alternatively, antibodies reactive with ORFX or target molecules, but which do not interfere with binding of the ORFX protein to its target molecule, can be derivatized to the wells of the plate, and unbound target or ORFX trapped in the wells by antibody conjugation. Methods for detecting such complexes, in addition to those described above for the GST-immobilized complexes, include immunodetection of complexes using antibodies reactive with the ORFX or target molecule, as well as enzyme-linked assays that rely on detecting an enzymatic activity associated with the ORFX or target molecule.

[0192] In another embodiment, modulators of ORFX expression are identified in a method wherein a cell is contacted with a candidate compound and the expression of ORFX mRNA or protein in the cell is determined. The level of expression of ORFX mRNA or protein in the presence of the candidate compound is compared to the level of expression of ORFX mRNA or protein in the absence of the candidate compound. The candidate compound can then be identified as a modulator of ORFX expression based on this comparison. For example, when expression of ORFX mRNA or protein is greater (statistically significantly greater) in the presence of the candidate compound than in its absence, the candidate compound is identified as a stimulator of ORFX mRNA or protein expression. Alternatively, when expression of ORFX mRNA or protein is less (statistically significantly less) in the presence of the candidate compound than in its absence, the candidate compound is identified as an inhibitor of ORFX mRNA or protein expression. The level of ORFX mRNA or protein expression in the cells can be determined by methods described herein for detecting ORFX mRNA or protein.

[0193] In yet another aspect of the invention, the ORFX proteins can be used as “bait proteins” in a two-hybrid assay or three hybrid assay (see, e.g., U.S. Pat. No. 5,283,317; Zervos et al. (1993) Cell 72:223-232; Madura et al. (1993) J Biol Chem 268:12046-12054; Bartel et al. (1993) Biotechniques 14:920-924; Iwabuchi et al. (1993) Oncogene 8:1693-1696; and Brent WO94/10300), to identify other proteins that bind to or interact with ORFX (“ORFX-binding proteins” or “ORFX-bp”) and modulate ORFX activity. Such ORFX-binding proteins are also likely to be involved in the propagation of signals by the ORFX proteins as, for example, upstream or downstream elements of the ORFX pathway.

[0194] The two-hybrid system is based on the modular nature of most transcription factors, which consist of separable DNA-binding and activation domains. Briefly, the assay utilizes two different DNA constructs. In one construct, the gene that codes for ORFX is fused to a gene encoding the DNA binding domain of a known transcription factor (e.g., GAL-4). In the other construct, a DNA sequence, from a library of DNA sequences, that encodes an unidentified protein (“prey” or “sample”) is fused to a gene that codes for the activation domain of the known transcription factor. If the “bait” and the “prey” proteins are able to interact, in vivo, forming an ORFX-dependent complex, the DNA-binding and activation domains of the transcription factor are brought into close proximity. This proximity allows transcription of a reporter gene (e.g., LacZ) that is operably linked to a transcriptional regulatory site responsive to the transcription factor. Expression of the reporter gene can be detected and cell colonies containing the functional transcription factor can be isolated and used to obtain the cloned gene that encodes the protein which interacts with ORFX.

[0195] This invention further pertains to novel agents identified by the above-described screening assays and uses thereof for treatments as described herein.

[0196] Detection Assays

[0197] Portions or fragments of the CDNA sequences identified herein (and the corresponding complete gene sequences) can be used in numerous ways as polynucleotide reagents. For example, these sequences can be used to: (i) map their respective genes on a chromosome; and, thus, locate gene regions associated with genetic disease; (ii) identify an individual from a minute biological sample (tissue typing); and (iii) aid in forensic identification of a biological sample.

[0198] The ORFX sequences of the present invention can also be used to identify individuals from minute biological samples. In this technique, an individual's genomic DNA is digested with one or more restriction enzymes, and probed on a Southern blot to yield unique bands for identification. The sequences of the present invention are useful as additional DNA markers for RFLP (“restriction fragment length polymorphisms,” described in U.S. Pat. No. 5,272,057).

[0199] Furthermore, the sequences of the present invention can be used to provide an alternative technique that determines the actual base-by-base DNA sequence of selected portions of an individual's genome. Thus, the ORFX sequences described herein can be used to prepare two PCR primers from the 5′ and 3′ ends of the sequences. These primers can then be used to amplify an individual's DNA and subsequently sequence it.

[0200] Panels of corresponding DNA sequences from individuals, prepared in this manner, can provide unique individual identifications, as each individual will have a unique set of such DNA sequences due to allelic differences. The sequences of the present invention can be used to obtain such identification sequences from individuals and from tissue. The ORFX sequences of the invention uniquely represent portions of the human genome. Allelic variation occurs to some degree in the coding regions of these sequences, and to a greater degree in the noncoding regions. It is estimated that allelic variation between individual humans occurs with a frequency of about once per each 500 bases. Much of the allelic variation is due to single nucleotide polymorphisms (SNPs), which include restriction fragment length polymorphisms (RFLPs).

[0201] Each of the sequences described herein can, to some degree, be used as a standard against which DNA from an individual can be compared for identification purposes. Because greater numbers of polymorphisms occur in the noncoding regions, fewer sequences are necessary to differentiate individuals. The noncoding sequences of SEQ ID NO:2n−1 (wherein n=1 to 1051), as described above, can comfortably provide positive individual identification with a panel of perhaps 10 to 1,000 primers that each yield a noncoding amplified sequence of 100 bases. If predicted coding sequences are used, a more appropriate number of primers for positive individual identification would be 500-2,000.

[0202] Predictive Medicine

[0203] The present invention also pertains to the field of predictive medicine in which diagnostic assays, prognostic assays, pharmacogenomics, and monitoring clinical trials are used for prognostic (predictive) purposes to thereby treat an individual prophylactically. Accordingly, one aspect of the present invention relates to diagnostic assays for determining ORFX protein and/or nucleic acid expression as well as ORFX activity, in the context of a biological sample (e.g., blood, serum, cells, tissue) to thereby determine whether an individual is afflicted with a disease or disorder, or is at risk of developing a disorder, associated with aberrant ORFX expression or activity. The invention also provides for prognostic (or predictive) assays for determining whether an individual is at risk of developing a disorder associated with ORFX protein, nucleic acid expression or activity. For example, mutations in an ORFX gene can be assayed in a biological sample. Such assays can be used for prognostic or predictive purpose to thereby prophylactically treat an individual prior to the onset of a disorder characterized by or associated with ORFX protein, nucleic acid expression or activity.

[0204] Another aspect of the invention provides methods for determining ORFX protein, nucleic acid expression or ORFX activity in an individual to thereby select appropriate therapeutic or prophylactic agents for that individual (referred to herein as “pharmacogenomics”). Pharmacogenomics allows for the selection of agents (e.g., drugs) for therapeutic or prophylactic treatment of an individual based on the genotype of the individual (e.g., the genotype of the individual examined to determine the ability of the individual to respond to a particular agent.)

[0205] Yet another aspect of the invention pertains to monitoring the influence of agents (e.g., drugs, compounds) on the expression or activity of ORFX in clinical trials.

[0206] Use of Partial ORFX Sequences in Forensic Biology

[0207] DNA-based identification techniques can also be used in forensic biology. Forensic biology is a scientific field employing genetic typing of biological evidence found at a crime scene as a means for positively identifying, for example, a perpetrator of a crime. To make such an identification, PCR technology can be used to amplify DNA sequences taken from very small biological samples such as tissues, e.g., hair or skin, or body fluids, e.g., blood, saliva, or semen found at a crime scene. The amplified sequence can then be compared to a standard, thereby allowing identification of the origin of the biological sample.

[0208] The sequences of the present invention can be used to provide polynucleotide reagents, e.g., PCR primers, targeted to specific loci in the human genome, that can enhance the reliability of DNA-based forensic identifications by, for example, providing another “identification marker” (i.e. another DNA sequence that is unique to a particular individual). As mentioned above, actual base sequence information can be used for identification as an accurate alternative to patterns formed by restriction enzyme generated fragments. Sequences targeted to noncoding regions of SEQ ID NOs:______ are particularly appropriate for this use as greater numbers of polymorphisms occur in the noncoding regions, making it easier to differentiate individuals using this technique. Examples of polynucleotide reagents include the ORFX sequences or portions thereof, e.g., fragments derived from the noncoding regions of one or more of SEQ ID NO:2n−1 (where n=1 to 1051), having a length of at least 20 bases, preferably at least 30 bases.

[0209] The ORFX sequences described herein can further be used to provide polynucleotide reagents, e.g., labeled or label-able probes that can be used, for example, in an in situ hybridization technique, to identify a specific tissue, e.g., brain tissue, etc. This can be very useful in cases where a forensic pathologist is presented with a tissue of unknown origin. Panels of such ORFX probes can be used to identify tissue by species and/or by organ type.

[0210] In a similar fashion, these reagents, e.g., ORFX primers or probes can be used to screen tissue culture for contamination (i.e. screen for the presence of a mixture of different types of cells in a culture).

[0211] Predictive Medicine

[0212] The present invention also pertains to the field of predictive medicine in which diagnostic assays, prognostic assays, pharmacogenomics, and monitoring clinical trials are used for prognostic (predictive) purposes to thereby treat an individual prophylactically. Accordingly, one aspect of the present invention relates to diagnostic assays for determining ORFX protein and/or nucleic acid expression as well as ORFX activity, in the context of a biological sample (e.g., blood, serum, cells, tissue) to thereby determine whether an individual is afflicted with a disease or disorder, or is at risk of developing a disorder, associated with aberrant ORFX expression or activity. The invention also provides for prognostic (or predictive) assays for determining whether an individual is at risk of developing a disorder associated with ORFX protein, nucleic acid expression or activity. For example, mutations in an ORFX gene can be assayed in a biological sample. Such assays can be used for prognostic or predictive purpose to thereby prophylactically treat an individual prior to the onset of a disorder characterized by or associated with ORFX protein, nucleic acid expression or activity.

[0213] Another aspect of the invention provides methods for determining ORFX protein, nucleic acid expression or ORFX activity in an individual to thereby select appropriate therapeutic or prophylactic agents for that individual (referred to herein as “pharmacogenomics”). Pharmacogenomics allows for the selection of agents (e.g., drugs) for therapeutic or prophylactic treatment of an individual based on the genotype of the individual (e.g., the genotype of the individual examined to determine the ability of the individual to respond to a particular agent.)

[0214] Yet another aspect of the invention pertains to monitoring the influence of agents (e.g., drugs, compounds) on the expression or activity of ORFX in clinical trials.

[0215] These and other agents are described in further detail in the following sections.

[0216] Diagnostic Assays

[0217] Other conditions in which proliferation of cells plays a role include tumors, restenosis, psoriasis, Dupuytren's contracture, diabetic complications, Kaposi's sarcoma and rheumatoid arthritis.

[0218] An ORFX polypeptide may be used to identify an interacting polypeptide a sample or tissue. The method comprises contacting the sample or tissue with ORFX, allowing formation of a complex between the ORFX polypeptide and the interacting polypeptide, and detecting the complex, if present.

[0219] The proteins of the invention may be used to stimulate production of antibodies specifically binding the proteins. Such antibodies may be used in immunodiagnostic procedures to detect the occurrence of the protein in a sample. The proteins of the invention may be used to stimulate cell growth and cell proliferation in conditions in which such growth would be favorable. An example would be to counteract toxic side effects of chemotherapeutic agents on, for example, hematopoiesis and platelet formation, linings of the gastrointestinal tract, and hair follicles. They may also be used to stimulate new cell growth in neurological disorders including, for example, Alzheimer's disease. Alternatively, antagonistic treatments may be administered in which an antibody specifically binding the ORFX -like proteins of the invention would abrogate the specific grovth-inducing effects of the proteins. Such antibodies may be useful, for example, in the treatment of proliferative disorders including various tumors and benign hyperplasias.

[0220] Polynucleotides or oligonucleotides corresponding to any one portion of the ORFX nucleic acids of SEQ ID NO:2n−1 (wherein n=1 to 1051) may be used to detect DNA containing a corresponding ORF gene, or detect the expression of a corresponding ORFX gene, or ORFX-like gene. For example, an ORFX nucleic acid expressed in a particular cell or tissue, as noted in Table 2, can be used to identify the presence of that particular cell type.

[0221] An exemplary method for detecting the presence or absence of ORFX in a biological sample involves obtaining a biological sample from a test subject and contacting the biological sample with a compound or an agent capable of detecting ORFX protein or nucleic acid (e.g., mRNA, genomic DNA) that encodes ORFX protein such that the presence of ORFX is detected in the biological sample. An agent for detecting ORFX mRNA or genomic DNA is a labeled nucleic acid probe capable of hybridizing to ORFX mRNA or genomic DNA. The nucleic acid probe can be, for example, a full-length ORFX nucleic acid, such as the nucleic acid of SEQ ID NO:2n−1 (wherein n=1 to 1051), or a portion thereof, such as an oligonucleotide of at least 15, 30, 50, 100, 250 or 500 nucleotides in length and sufficient to specifically hybridize under stringent conditions to ORFX mRNA or genomic DNA, as described above. Other suitable probes for use in the diagnostic assays of the invention are described herein.

[0222] An agent for detecting ORFX protein is an antibody capable of binding to ORFX protein, preferably an antibody with a detectable label. Antibodies can be polyclonal, or more preferably, monoclonal. An intact antibody, or a fragment thereof (e.g., F_{ab} or F_{(ab)2}) can be used. The term “labeled”, with regard to the probe or antibody, is intended to encompass direct labeling of the probe or antibody by coupling (i.e., physically linking) a detectable substance to the probe or antibody, as well as indirect labeling of the probe or antibody by reactivity with another reagent that is directly labeled. Examples of indirect labeling include detection of a primary antibody using a fluorescently labeled secondary antibody and end-labeling of a DNA probe with biotin such that it can be detected with fluorescently labeled streptavidin. The term “biological sample” is intended to include tissues, cells and biological fluids isolated from a subject, as well as tissues, cells and fluids present within a subject. That is, the detection method of the invention can be used to detect ORFX mRNA, protein, or genomic DNA in a biological sample in vitro as well as in vivo. For example, in vitro techniques for detection of ORFX mRNA include Northern hybridizations and in situ hybridizations. In vitro techniques for detection of ORFX protein include enzyme linked immunosorbent assays (ELISAs), Western blots, immunoprecipitations and immunofluorescence. In vitro techniques for detection of ORFX genomic DNA include Southern hybridizations. Furthermore, in vivo techniques for detection of ORFX protein include introducing into a subject a labeled anti-ORFX antibody. For example, the antibody can be labeled with a radioactive marker whose presence and location in a subject can be detected by standard imaging techniques.

[0223] In one embodiment, the biological sample contains protein molecules from the test subject. Alternatively, the biological sample can contain mRNA molecules from the test subject or genomic DNA molecules from the test subject. A preferred biological sample is a peripheral blood leukocyte sample isolated by conventional means from a subject.

[0224] In another embodiment, the methods further involve obtaining a control biological sample from a control subject, contacting the control sample with a compound or agent capable of detecting ORFX protein, mRNA, or genomic DNA, such that the presence of ORFX protein, mRNA or genomic DNA is detected in the biological sample, and comparing the presence of ORFX protein, mRNA or genomic DNA in the control sample with the presence of ORFX protein, mRNA or genomic DNA in the test sample.

[0225] The invention also encompasses kits for detecting the presence of ORFX in a biological sample. For example, the kit can comprise: a labeled compound or agent capable of detecting ORFX protein or mRNA in a biological sample; means for determining the amount of ORFX in the sample; and means for comparing the amount of ORFX in the sample with a standard. The compound or agent can be packaged in a suitable container. The kit can further comprise instructions for using the kit to detect ORFX protein or nucleic acid.

[0226] Prognostic Assays

[0227] The diagnostic methods described herein can furthermore be utilized to identify subjects having or at risk of developing a disease or disorder associated with aberrant ORFX expression or activity. For example, the assays described herein, such as the preceding diagnostic assays or the following assays, can be utilized to identify a subject having or at risk of developing a disorder associated with ORFX protein, nucleic acid expression or activity in, e.g., proliferative or differentiative disorders such as hyperplasias, tumors, restenosis, psoriasis, Dupuytren's contracture, diabetic complications, or rheumatoid arthritis, etc.; and glia-associated disorders such as cerebral lesions, diabetic neuropathies, cerebral edema, senile dementia, Alzheimer's disease, etc. Alternatively, the prognostic assays can be utilized to identify a subject having or at risk for developing a disease or disorder. Thus, the present invention provides a method for identifying a disease or disorder associated with aberrant ORFX expression or activity in which a test sample is obtained from a subject and ORFX protein or nucleic acid (e.g., mRNA, genomic DNA) is detected, wherein the presence of ORFX protein or nucleic acid is diagnostic for a subject having or at risk of developing a disease or disorder associated with aberrant ORFX expression or activity. As used herein, a “test sample” refers to a biological sample obtained from a subject of interest. For example, a test sample can be a biological fluid (e.g., serum), cell sample, or tissue.

[0228] Furthermore, the prognostic assays described herein can be used to determine whether a subject can be administered an agent (e.g., an agonist, antagonist, peptidomimetic, protein, peptide, nucleic acid, small molecule, or other drug candidate) to treat a disease or disorder associated with aberrant ORFX expression or activity. For example, such methods can be used to determine whether a subject can be effectively treated with an agent for a disorder, such as a proliferative disorder, differentiative disorder, glia-associated disorders, etc. Thus, the present invention provides methods for determining whether a subject can be effectively treated with an agent for a disorder associated with aberrant ORFX expression or activity in which a test sample is obtained and ORFX protein or nucleic acid is detected (e.g., wherein the presence of ORFX protein or nucleic acid is diagnostic for a subject that can be administered the agent to treat a disorder associated with aberrant ORFX expression or activity.)

[0229] The methods of the invention can also be used to detect genetic lesions in an ORFX gene, thereby determining if a subject with the lesioned gene is at risk for, or suffers from, a proliferative disorder, differentiative disorder, glia-associated disorder, etc. In various embodiments, the methods include detecting, in a sample of cells from the subject, the presence or absence of a genetic lesion characterized by at least one of an alteration affecting the integrity of a gene encoding an ORFX-protein, or the mis-expression of the ORFX gene. For example, such genetic lesions can be detected by ascertaining the existence of at least one of (1) a deletion of one or more nucleotides from an ORFX gene; (2) an addition of one or more nucleotides to an ORFX gene; (3) a substitution of one or more nucleotides of an ORFX gene, (4) a chromosomal rearrangement of an ORFX gene; (5) an alteration in the level of a messenger RNA transcript of an ORFX gene, (6) aberrant modification of an ORFX gene, such as of the methylation pattern of the genomic DNA, (7) the presence of a non-wild type splicing pattern of a messenger RNA transcript of an ORFX gene, (8) a non-wild type level of an ORFX-protein, (9) allelic loss of an ORFX gene, and (10) inappropriate post-translational modification of an ORFX-protein. As described herein, there are a large number of assay techniques known in the art which can be used for detecting lesions in an ORFX gene. A preferred biological sample is a peripheral blood leukocyte sample isolated by conventional means from a subject. However, any biological sample containing nucleated cells may be used, including, for example, buccal mucosal cells.

[0230] In certain embodiments, detection of the lesion involves the use of a probe/primer in a polymerase chain reaction (PCR) (see, e.g., U.S. Pat. Nos. 4,683,195 and 4,683,202), such as anchor PCR or RACE PCR, or, alternatively, in a ligation chain reaction (LCR) (see, e.g., Landegran et al. (1988) Science 241:1077-1080; and Nakazawa et al. (1994) PNAS 91:360-364), the latter of which can be particularly useful for detecting point mutations in the ORFX-gene (see Abravaya et al. (1995) Nucl Acids Res 23:675-682). This method can include the steps of collecting a sample of cells from a patient, isolating nucleic acid (e.g., genomic, mRNA or both) from the cells of the sample, contacting the nucleic acid sample with one or more primers that specifically hybridize to an ORFX gene under conditions such that hybridization and amplification of the ORFX gene (if present) occurs, and detecting the presence or absence of an amplification product, or detecting the size of the amplification product and comparing the length to a control sample. It is anticipated that PCR and/or LCR may be desirable to use as a preliminary amplification step in conjunction with any of the techniques used for detecting mutations described herein.

[0231] Alternative amplification methods include: self sustained sequence replication (Guatelli et al., 1990, Proc Natl Acad Sci USA 87:1874-1878), transcriptional amplification system (Kwoh, et al., 1989, Proc Natl Acad Sci USA 86:1173-1177), Q-Beta Replicase (Lizardi et al, 1988, BioTechnology 6:1197), or any other nucleic acid amplification method, followed by the detection of the amplified molecules using techniques well known to those of skill in the art. These detection schemes are especially useful for the detection of nucleic acid molecules if such molecules are present in very low numbers.

[0232] In an alternative embodiment, mutations in an ORFX gene from a sample cell can be identified by alterations in restriction enzyme cleavage patterns. For example, sample and control DNA is isolated, amplified (optionally), digested with one or more restriction endonucleases, and fragment length sizes are determined by gel electrophoresis and compared. Differences in fragment length sizes between sample and control DNA indicates mutations in the sample DNA. Moreover, the use of sequence specific ribozymes (see, for example, U.S. Pat. No. 5,493,531) can be used to score for the presence of specific mutations by development or loss of a ribozyme cleavage site.

[0233] In other embodiments, genetic mutations in ORFX can be identified by hybridizing a sample and control nucleic acids, e.g., DNA or RNA, to high density arrays containing hundreds or thousands of oligonucleotides probes (Cronin et al. (1996) Human mutation 7: 244-255; Kozal et al. (1996) Nature Medicine 2: 753-759). For example, genetic mutations in ORFX can be identified in two dimensional arrays containing light-generated DNA probes as described in Cronin et al. above. Briefly, a first hybridization array of probes can be used to scan through long stretches of DNA in a sample and control to identify base changes between the sequences by making linear arrays of sequential overlapping probes. This step allows the identification of point mutations. This step is followed by a second hybridization array that allows the characterization of specific mutations by using smaller, specialized probe arrays complementary to all variants or mutations detected. Each mutation array is composed of parallel probe sets, one complementary to the wild-type gene and the other complementary to the mutant gene.

[0234] In yet another embodiment, any of a variety of sequencing reactions known in the art can be used to directly sequence the ORFX gene and detect mutations by comparing the sequence of the sample ORFX with the corresponding wild-type (control) sequence. Examples of sequencing reactions include those based on techniques developed by Maxim and Gilbert (1977) PNAS 74:560 or Sanger (1977) PNAS 74:5463. It is also contemplated that any of a variety of automated sequencing procedures can be utilized when performing the diagnostic assays (Naeve et al., (1995) Biotechniques 19:448), including sequencing by mass spectrometry (see, e.g., PCT International Publ. No. WO 94/16101; Cohen et al. (1996) Adv Chromatogr 36:127-162; and Griffin et al. (1993) Appl Biochem Biotechnol 38:147-159).

[0235] Other methods for detecting mutations in the ORFX gene include methods in which protection from cleavage agents is used to detect mismatched bases in RNA/RNA or RNA/DNA heteroduplexes (Myers et al. (1985) Science 230:1242). In general, the art technique of “mismatch cleavage” starts by providing heteroduplexes of formed by hybridizing (labeled) RNA or DNA containing the wild-type ORFX sequence with potentially mutant RNA or DNA obtained from a tissue sample. The double-stranded duplexes are treated with an agent that cleaves single-stranded regions of the duplex such as which will exist due to basepair mismatches between the control and sample strands. For instance, RNA/DNA duplexes can be treated with RNase and DNA/DNA hybrids treated with S1 nuclease to enzymatically digesting the mismatched regions. In other embodiments, either DNA/DNA or RNA/DNA duplexes can be treated with hydroxylamine or osmium tetroxide and with piperidine in order to digest mismatched regions. After digestion of the mismatched regions, the resulting material is then separated by size on denaturing polyacrylamide gels to determine the site of mutation. See, for example, Cotton etal (1988) Proc Natl Acad Sci USA 85:4397; Saleeba et al (1992) Methods Enzymol 217:286-295. In an embodiment, the control DNA or RNA can be labeled for detection.

[0236] In still another embodiment, the mismatch cleavage reaction employs one or more proteins that recognize mismatched base pairs in double-stranded DNA (so called “DNA mismatch repair” enzymes) in defined systems for detecting and mapping point mutations in ORFX cDNAs obtained from samples of cells. For example, the mutY enzyme of E. coli cleaves A at G/A mismatches and the thymidine DNA glycosylase from HeLa cells cleaves T at G/T mismatches (Hsu et al. (1994) Carcinogenesis 15:1657-1662). According to an exemplary embodiment, a probe based on an ORFX sequence, e.g, a wild-type ORFX sequence, is hybridized to a cDNA or other DNA product from a test cell(s). The duplex is treated with a DNA mismatch repair enzyme, and the cleavage products, if any, can be detected from electrophoresis protocols or the like. See, for example, U.S. Pat. No. 5,459,039.

[0237] In other embodiments, alterations in electrophoretic mobility will be used to identify mutations in ORFX genes. For example, single strand conformation polymorphism (SSCP) may be used to detect differences in electrophoretic mobility between mutant and wild type nucleic acids (Orita et al. (1989) Proc Natl Acad Sci USA: 86:2766, see also Cotton (1993) Mutat Res 285:125-144; Hayashi (1992) Genet Anal Tech Appl 9:73-79). Single-stranded DNA fragments of sample and control ORFX nucleic acids will be denatured and allowed to renature. The secondary structure of single-stranded nucleic acids varies according to sequence, the resulting alteration in electrophoretic mobility enables the detection of even a single base change. The DNA fragments may be labeled or detected with labeled probes. The sensitivity of the assay may be enhanced by using RNA, rather than DNA, in which the secondary structure is more sensitive to a change in sequence. In one embodiment, the subject method utilizes heteroduplex analysis to separate double stranded heteroduplex molecules on the basis of changes in electrophoretic mobility. See, e.g., Keen et al. (1991) Trends Genet 7:5.

[0238] In yet another embodiment the movement of mutant or wild-type fragments in polyacrylamide gels containing a gradient of denaturant is assayed using denaturing gradient gel electrophoresis (DGGE). See, e.g., Myers et al (1985) Nature 313:495. When DGGE is used as the method of analysis, DNA will be modified to insure that it does not completely denature, for example by adding a GC clamp of approximately 40 bp of high-melting GC-rich DNA by PCR. In a further embodiment, a temperature gradient is used in place of a denaturing gradient to identify differences in the mobility of control and sample DNA. See, e.g., Rosenbaum and Reissner (1987) Biophys Chem 265:12753.

[0239] Examples of other techniques for detecting point mutations include, but are not limited to, selective oligonucleotide hybridization, selective amplification, or selective primer extension. For example, oligonucleotide primers may be prepared in which the known mutation is placed centrally and then hybridized to target DNA under conditions that permit hybridization only if a perfect match is found. See, e.g., Saiki et al. (1986) Nature 324:163); Saiki et al. (1989) Proc Natl Acad. Sci USA 86:6230. Such allele specific oligonucleotides are hybridized to PCR amplified target DNA or a number of different mutations when the oligonucleotides are attached to the hybridizing membrane and hybridized with labeled target DNA.

[0240] Alternatively, allele specific amplification technology that depends on selective PCR amplification may be used in conjunction with the instant invention. Oligonucleotides used as primers for specific amplification may carry the mutation of interest in the center of the molecule (so that amplification depends on differential hybridization) (Gibbs et al. (1989) Nucleic Acids Res 17:2437-2448) or at the extreme 3′ end of one primer where, under appropriate conditions, mismatch can prevent, or reduce polymerase extension (Prossner (1993) Tibtech 11:238). In addition it may be desirable to introduce a novel restriction site in the region of the mutation to create cleavage-based detection. See, e.g., Gasparini et al (1992) Mol Cell Probes 6:1. It is anticipated that in certain embodiments amplification may also be performed using Taq ligase for amplification. See, e.g., Barany (1991) Proc NatlAcadSci USA 88:189. In such cases, ligation will occur only if there is a perfect match at the 3′ end of the 5′ sequence, making it possible to detect the presence of a known mutation at a specific site by looking for the presence or absence of amplification.

[0241] The methods described herein may be performed, for example, by utilizing pre-packaged diagnostic kits comprising at least one probe nucleic acid or antibody reagent described herein, which may be conveniently used, e.g., in clinical settings to diagnose patients exhibiting symptoms or family history of a disease or illness involving an ORFX gene.

[0242] Furthermore, any cell type or tissue, preferably peripheral blood leukocytes, in which ORFX is expressed may be utilized in the prognostic assays described herein. However, any biological sample containing nucleated cells may be used, including, for example, buccal mucosal cells.

[0243] Pharmacogenomics

[0244] Agents, or modulators that have a stimulatory or inhibitory effect on ORFX activity (e.g., ORFX gene expression), as identified by a screening assay described herein can be administered to individuals to treat (prophylactically or therapeutically) disorders (e.g., neurological, cancer-related or gestational disorders) associated with aberrant ORFX activity. In conjunction with such treatment, the pharmacogenomics (i.e., the study of the relationship between an individual's genotype and that individual's response to a foreign compound or drug) of the individual may be considered. Differences in metabolism of therapeutics can lead to severe toxicity or therapeutic failure by altering the relation between dose and blood concentration of the pharmacologically active drug. Thus, the pharmacogenomics of the individual permits the selection of effective agents (e.g., drugs) for prophylactic or therapeutic treatments based on a consideration of the individual's genotype. Such pharmacogenomics can further be used to determine appropriate dosages and therapeutic regimens. Accordingly, the activity of ORFX protein, expression of ORFX nucleic acid, or mutation content of ORFX genes in an individual can be determined to thereby select appropriate agent(s) for therapeutic or prophylactic treatment of the individual.

[0245] Pharmacogenomics deals with clinically significant hereditary variations in the response to drugs due to altered drug disposition and abnormal action in affected persons. See e.g., Eichelbaum, 1996, Clin Exp Pharmacol Physiol, 23:983-985 and Linder, 1997, Clin Chem, 43:254-266. In general, two types of pharmacogenetic conditions can be differentiated. Genetic conditions transmitted as a single factor altering the way drugs act on the body (altered drug action) or genetic conditions transmitted as single factors altering the way the body acts on drugs (altered drug metabolism). These pharmacogenetic conditions can occur either as rare defects or as polymorphisms. For example, glucose-6-phosphate dehydrogenase (G6PD) deficiency is a common inherited enzymopathy in which the main clinical complication is haemolysis after ingestion of oxidant drugs (anti-malarials, sulfonamides, analgesics, nitrofurans) and consumption of fava beans.

[0246] As an illustrative embodiment, the activity of drug metabolizing enzymes is a major determinant of both the intensity and duration of drug action. The discovery of genetic polymorphisms of drug metabolizing enzymes (e.g., N-acetyltransferase 2 (NAT 2) and cytochrome P450 enzymes CYP2D6 and CYP2C 19) has provided an explanation as to why some patients do not obtain the expected drug effects or show exaggerated drug response and serious toxicity after taking the standard and safe dose of a drug. These polymorphisms are expressed in two phenotypes in the population, the extensive metabolizer (EM) and poor metabolizer (PM). The prevalence of PM is different among different populations. For example, the gene coding for CYP2D6 is highly polymorphic and several mutations have been identified in PM, which all lead to the absence of functional CYP2D6. Poor metabolizers of CYP2D6 and CYP2C19 quite frequently experience exaggerated drug response and side effects when they receive standard doses. If a metabolite is the active therapeutic moiety, PM show no therapeutic response, as demonstrated for the analgesic effect of codeine mediated by its CYP2D6-formed metabolite morphine. The other extreme are the so called ultra-rapid metabolizers who do not respond to standard doses. Recently, the molecular basis of ultra-rapid metabolism has been identified to be due to CYP2D6 gene amplification.

[0247] Thus, the activity of ORFX protein, expression of ORFX nucleic acid, or mutation content of ORFX genes in an individual can be determined to thereby select appropriate agent(s) for therapeutic or prophylactic treatment of the individual. In addition, pharmacogenetic studies can be used to apply genotyping of polymorphic alleles encoding drug-metabolizing enzymes to the identification of an individual's drug responsiveness phenotype. This knowledge, when applied to dosing or drug selection, can avoid adverse reactions or therapeutic failure and thus enhance therapeutic or prophylactic efficiency when treating a subject with an ORFX modulator, such as a modulator identified by one of the exemplary screening assays described herein.

[0248] Monitoring Clinical Efficacy

[0249] Monitoring the influence of agents (e.g., drugs, compounds) on the expression or activity of ORFX (e.g., the ability to modulate aberrant cell proliferation and/or differentiation) can be applied in basic drug screening and in clinical trials. For example, the effectiveness of an agent determined by a screening assay as described herein to increase ORFX gene expression, protein levels, or upregulate ORFX activity, can be monitored in clinical trials of subjects exhibiting decreased ORFX gene expression, protein levels, or downregulated ORFX activity. Alternatively, the effectiveness of an agent determined by a screening assay to decrease ORFX gene expression, protein levels, or downregulate ORFX activity, can be monitored in clinical trials of subjects exhibiting increased ORFX gene expression, protein levels, or upregulated ORFX activity. In such clinical trials, the expression or activity of ORFX and, preferably, other genes that have been implicated in, for example, a proliferative or neurological disorder, can be used as a “read out” or marker of the responsiveness of a particular cell.

[0250] For example, genes, including ORFX, that are modulated in cells by treatment with an agent (e.g., compound, drug or small molecule) that modulates ORFX activity (e.g., identified in a screening assay as described herein) can be identified. Thus, to study the effect of agents on cellular proliferation disorders, for example, in a clinical trial, cells can be isolated and RNA prepared and analyzed for the levels of expression of ORFX and other genes implicated in the disorder. The levels of gene expression (i.e., a gene expression pattern) can be quantified by Northern blot analysis or RT-PCR, as described herein, or alternatively by measuring the amount of protein produced, by one of the methods as described herein, or by measuring the levels of activity of ORFX or other genes. In this way, the gene expression pattern can serve as a marker, indicative oi the physiological response of the cells to the agent. Accordingly, this response state may be determined before, and at various points during, treatment of the individual with the agent.

[0251] In one embodiment, the invention provides a method for monitoring the effectiveness of treatment of a subject with an agent (e.g., an agonist, antagonist, protein, peptide, nucleic acid, peptidomimetic, small molecule, or other drug candidate identified by the screening assays described herein) comprising the steps of (i) obtaining a pre-administration sample from a subject prior to administration of the agent; (ii) detecting the level of expression of an ORFX protein, mRNA, or genomic DNA in the preadministration sample; (iii) obtaining one or more post-administration samples from the subject; (iv) detecting the level of expression or activity of the ORFX protein, mRNA, or genomic DNA in the post-administration samples; (v) comparing the level of expression or activity of the ORFX protein, mRNA, or genomic DNA in the pre-administration sample with the ORFX protein, mRNA, or genomic DNA in the post administration sample or samples; and (vi) altering the administration of the agent to the subject accordingly. For example, increased administration of the agent may be desirable to increase the expression or activity of ORFX to higher levels than detected, i.e., to increase the effectiveness of the agent. Alternatively, decreased administration of the agent may be desirable to decrease expression or activity of ORFX to lower levels than detected, i.e., to decrease the effectiveness of the agent.

[0252] Methods of Treatment

[0253] The present invention provides for both prophylactic and therapeutic methods of treating a subject at risk of (or susceptible to) a disorder or having a disorder associated with aberrant ORFX expression or activity.

[0254] Diseases and disorders that are characterized by increased (relative to a subject not suffering from the disease or disorder) levels or biological activity may be treated with Therapeutics that antagonize (i.e., reduce or inhibit) activity. Therapeutics that antagonize activity may be administered in a therapeutic or prophylactic manner. Therapeutics that may be utilized include, but are not limited to, (i) an ORFX polypeptide, or analogs, derivatives, fragments or homologs thereof; (ii) antibodies to an ORFX peptide; (iii) nucleic acids encoding an ORFX peptide; (iv) administration of antisense nucleic acid and nucleic acids that are “dysfunctional” (i.e., due to a heterologous insertion within the coding sequences of coding sequences to an ORFX peptide) that are utilized to “knockout” endogenous function of an ORFX peptide by homologous recombination (see, e.g., Capecchi, 1989, Science 244: 1288-1292); or (v) modulators (i.e., inhibitors, agonists and antagonists, including additional peptide mimetic of the invention or antibodies specific to a peptide of the invention) that alter the interaction between an ORFX peptide and its binding partner.

[0255] Diseases and disorders that are characterized by decreased (relative to a subject not suffering from the disease or disorder) levels or biological activity may be treated with Therapeutics that increase (i.e., are agonists to) activity. Therapeutics that upregulate activity may be administered in a therapeutic or prophylactic manner. Therapeutics that may be utilized include, but are not limited to, an ORFX peptide, or analogs, derivatives, fragments or homologs thereof; or an agonist that increases bioavailability.

[0256] Increased or decreased levels can be readily detected by quantifying peptide and/or RNA, by obtaining a patient tissue sample (e.g., from biopsy tissue) and assaying it in vitro for RNA or peptide levels, structure and/or activity of the expressed peptides (or mRNAs of an ORFX peptide). Methods that are well-known within the art include, but are not limited to, immunoassays (e.g., by Western blot analysis, immunoprecipitation followed by sodium dodecyl sulfate (SDS) polyacrylamide gel electrophoresis, immunocytochemistry, etc.) and/or hybridization assays to detect expression of mRNAs (e.g., Northern assays, dot blots, in situ hybridization, etc.).

[0257] In one aspect, the invention provides a method for preventing, in a subject, a disease or condition associated with an aberrant ORFX expression or activity, by administering to the subject an agent that modulates ORFX expression or at least one ORFX activity. Subjects at risk for a disease that is caused or contributed to by aberrant ORFX expression or activity can be identified by, for example, any or a combination of diagnostic or prognostic assays as described herein. Administration of a prophylactic agent can occur prior to the manifestation of symptoms characteristic of the ORFX aberrancy, such that a disease or disorder is prevented or, alternatively, delayed in its progression. Depending on the type of ORFX aberrancy, for example, an ORFX agonist or ORFX antagonist agent can be used for treating the subject. The appropriate agent can be determined based on screening assays described herein.

[0258] Another aspect of the invention pertains to methods of modulating ORFX expression or activity for therapeutic purposes. The modulatory method of the invention involves contacting a cell with an agent that modulates one or more of the activities of ORFX protein activity associated with the cell. An agent that modulates ORFX protein activity can be an agent as described herein, such as a nucleic acid or a protein, a naturally-occurring cognate ligand of an ORFX protein, a peptide, an ORFX peptidomimetic, or other small molecule. In one embodiment, the agent stimulates one or more ORFX protein activity. Examples of such stimulatory agents include active ORFX protein and a nucleic acid molecule encoding ORFX that has been introduced into the cell. In another embodiment, the agent inhibits one or more ORFX protein activity. Examples of such inhibitory agents include antisense ORFX nucleic acid molecules and anti-ORFX antibodies. These modulatory methods can be performed in vitro (e.g., by culturing the cell with the agent) or, alternatively, in vivo (e.g., by administering the agent to a subject). As such, the present invention provides methods of treating an individual afflicted with a disease or disorder characterized by aberrant expression or activity of an ORFX protein or nucleic acid molecule. In one embodiment, the method involves administering an agent (e.g., an agent identified by a screening assay described herein), or combination of agents that modulates (e.g., upregulates or downregulates) ORFX expression or activity. In another embodiment, the method involves administering an ORFX protein or nucleic acid molecule as therapy to compensate for reduced or aberrant ORFX expression or activity.

[0259] Determination of the Biological Effect of a Therapeutic

[0260] In various embodiments of the present invention, suitable in vitro or in vivo assays are utilized to determine the effect of a specific Therapeutic and whether its administration is indicated for treatment of the affected tissue.

[0261] In various specific embodiments, in vitro assays may be performed with representative cells of the type(s) involved in the patieni's disorder, to determine if a given Therapeutic exerts the desired effect upon the cell type(s). Compounds for use in therapy may be tested in suitable animal model systems including, but not limited to rats, mice, chicken, cows, monkeys, rabbits, and the like, prior to testing in human subjects. Similarly, for in vivo testing, any of the animal model system known in the art may be used prior to administration to human subjects.

[0262] Malignancies

[0263] Some ORFX polypeptides are expressed in cancerous cells (see, e.g., Tables 1 and 2). Accordingly, the corresponding ORF protein is involved in the regulation of cell proliferation. Accordingly, Therapeutics of the present invention may be useful in the therapeutic or prophylactic treatment of diseases or disorders that are associated with cell hyperproliferation and/or loss of control of cell proliferation (e g., cancers, malignancies and tumors). For a review of such hyperproliferation disorders, see e.g., Fishman, et al., 1985. MEDICINE, 2nd ed., J. B. Lippincott Co., Philadelphia, Pa.

[0264] Therapeutics of the present invention may be assayed by any method known within the art for efficacy in treating or preventing malignancies and related disorders. Such assays include, but are not limited to, in vitro assays utilizing transformed cells or cells derived from the patient's tumor, as well as in vivo assays using animal models of cancer or malignancies. Potentially effective Therapeutics are those that, for example, inhibit the proliferation of tumor-derived or transformed cells in culture or cause a regression of tumors in animal models, in comparison to the controls.

[0265] In the practice of the present invention, once a malignancy or cancer has been shown to be amenable to treatment by modulating (i.e., inhibiting, antagonizing or agonizing) activity, that cancer or malignancy may subsequently be treated or prevented by the administration of a Therapeutic that serves to modulate protein function.

[0266] Premalignant Conditions

[0267] The Therapeutics of the present invention that are effective in the therapeutic or prophylactic treatment of cancer or malignancies may also be administered for the treatment of pre-malignant conditions and/or to prevent the progression of a pre-malignancy to a neoplastic or malignant state. Such prophylactic or therapeutic use is indicated in conditions known or suspected of preceding progression to neoplasia or cancer, in particular, where non-neoplastic cell growth consisting of hyperplasia, metaplasia or, most particularly, dysplasia has occurred. For a review of such abnormal cell growth see e.g., Robbins & Angell, 1976. BASIC PATHOLOGY, 2nd ed., W. B. Saunders Co., Philadelphia, Pa.

[0268] Hyperplasia is a form of controlled cell proliferation involving an increase in cell number in a tissue or organ, without significant alteration in its structure or function. For example, it has been demonstrated that endometrial hyperplasia often precedes endometrial cancer. Metaplasia is a form of controlled cell growth in which one type of mature or fully differentiated cell substitutes for another type of mature cell. Metaplasia may occur in epithelial or connective tissue cells. Dysplasia is generally considered a precursor of cancer, and is found mainly in the epithelia. Dysplasia is the most disorderly form of non-neoplastic cell growth, and involves a loss in individual cell uniformity and in the architectural orientation of cells. Dysplasia characteristically occurs where there exists chronic irritation or inflammation, and is often found in the cervix, respiratory passages, oral cavity, and gall bladder.

[0269] Alternatively, or in addition to the presence of abnormal cell growth characterized as hyperplasia, metaplasia, or dysplasia, the presence of one or more characteristics of a transformed or malignant phenotype displayed either in vivo or in vitro within a cell sample derived from a patient, is indicative of the desirability of prophylactic/therapeutic administration of a Therapeutic that possesses the ability to modulate activity of An aforementioned protein. Characteristics of a transformed phenotype include, but are not limited to: (i) morphological changes; (ii) looser substratum attachment; (iii) loss of cell-to-cell contact inhibition; (iv) loss of anchorage dependence; (v) protease release; (vi) increased sugar transport; (vii) decreased serum requirement; (viii) expression of fetal antigens, (ix) disappearance of the 250 kDal cell-surface protein, and the like. See e.g., Richards, et al., 1986. MOLECULAR PATHOLOGY, W.B. Saunders Co., Philadelphia, Pa.

[0270] In a specific embodiment of the present invention, a patient that exhibits one or more of the following predisposing factors for malignancy is treated by administration of an effective amount of a Therapeutic: (i) a chromosomal translocation associated with a malignancy (e.g., the Philadelphia chromosome (bcr/abl) for chronic myelogenous leukemia and t(14; 18) for follicular lymphoma, etc.); (ii) familial polyposis or Gardner's syndrome (possible forerunners of colon cancer); (iii) monoclonal gaminopathy of undetermined significance (a possible precursor of multiple myeloma) and (iv) a first degree kinship with persons having a cancer or pre-cancerous disease showing a Mendelian (genetic) inheritance pattern (e.g., familial polyposis of the colon, Gardner's syndrome, hereditary exostosis, polyendocrine adenomatosis, Peutz-Jeghers syndrome, neurofibromatosis of Von Recklinghausen, medullary thyroid carcinoma with amyloid production and pheochromocytoma, retinoblastoma, carotid body tumor, cutaneous melanocarcinoma, intraocular melanocarcinoma, xeroderma pigmentosum, ataxia telangiectasia, Chediak-Higashi syndrome, albinism, Fanconi's aplastic anemia and Bloom's syndrome).

[0271] In another embodiment, a Therapeutic of the present invention is administered to a human patient to prevent the progression to breast, colon, lung, pancreatic, or uterine cancer, or melanoma or sarcoma.

[0272] Hyperproliferative and Dysproliferative Disorders

[0273] In one embodiment of the present invention, a Therapeutic is administered in the therapeutic or prophylactic treatment of hyperproliferative or benign dysproliferative disorders. The efficacy in treating or preventing hyperproliferative diseases or disorders of a Therapeutic of the present invention may be assayed by any method known within the art. Such assays include in vitro cell proliferation assays, in vitro or in vivo assays using animal models of hyperproliferative diseases or disorders, or the like. Potentially effective Therapeutics may, for example, promote cell proliferation in culture or cause growth or cell proliferation in animal models in comparison to controls.

[0274] Specific embodiments of the present invention are directed to the treatment or prevention of cirrhosis of the liver (a condition in which scarring has overtaken normal liver regeneration processes); treatment of keloid (hypertrophic scar) formation causing disfiguring of the skin in which the scarring process interferes with normal renewal; psoriasis (a common skin condition characterized by excessive proliferation of the skin and delay in proper cell fate determination); benign tumors; fibrocystic conditions and tissue hypertrophy (e.g., benign prostatic hypertrophy).

[0275] Neurodegenerative Disorders

[0276] Some ORFX proteins are found in cell types have been implicated in the deregulation of cellular maturation and apoptosis, which are both characteristic of neurodegenerative disease. Accordingly, Therapeutics of the invention, particularly but not limited to those that modulate (or supply) activity of an aforementioned protein, may be effective in treating or preventing neurodegenerative disease. Therapeutics of the present invention that modulate the activity of an aforementioned protein involved in neurodegenerative disorders can be assayed by any method known in the art for efficacy in treating or preventing such neurodegenerative diseases and disorders. Such assays include in vitro assays for regulated cell maturation or inhibition of apoptosis or in vivo assays using animal models of neurodegenerative diseases or disorders, or any of the assays described below. Potentially effective Therapeutics, for example but not by way of limitation, promote regulated cell maturation and prevent cell apoptosis in culture, or reduce neurodegeneration in animal models in comparison to controls.

[0277] Once a neurodegenerative disease or disorder has been shown to be amenable to treatment by modulation activity, that nearodegenerative disease or disorder can be treated or prevented by administration of a Therapeutic that modulates activity. Such diseases include all degenerative disorders involved with aging, especially osteoarthritis and neurodegenerative disorders.

[0278] Disorders Related to Organ Transplantation

[0279] Some ORFX can be associated with disorders related to organ transplantation, in particular but not limited to organ rejection. Therapeutics of the invention, particularly those that modulate (or supply) activity, may be effective in treating or preventing diseases or disorders related to organ transplantation. Therapeutics of the invention (particularly Therapeutics that modulate the levels or activity of an aforementioned protein) can be assayed by any method known in the art for efficacy in treating or preventing such diseases and disorders related to organ transplantation. Such assays include in vitro assays for using cell culture models as described below, or in vivo assays using animal models of diseases and disorders related to organ transplantation, see e.g., below. Potentially effective Therapeutics, for example but not by way of limitation, reduce immune rejection responses in animal models in comparison to controls.

[0280] Accordingly, once diseases and disorders related to organ transplantation are shown to be amenable to treatment by modulation of activity, such diseases or disorders can be treated or prevented by administration of a Therapeutic that modulates activity.

[0281] Cardiovascular Disease

[0282] ORFX of the present invention has been implicated in cardiovascular disorders, including in atherosclerotic plaque formation. Diseases such as cardiovascular disease, including cerebral thrombosis or hemorrhage, ischemic heart or renal disease, peripheral vascular disease, or thrombosis of other major vessel, and other diseases, including diabetes mellitus, hypertension, hypothyroidism, cholesterol ester storage disease, systemic lupus erythematosus, homocysteinemia, and familial protein or lipid processing diseases, and the like, are either directly or indirectly associated with atherosclerosis. Accordingly, Therapeutics of the invention, particularly those that modulate (or supply) activity or formation may be effective in treating or preventing atherosclerosis-associated diseases or disorders. Therapeutics of the invention (particularly Therapeutics that modulate the levels or activity) can be assayed by any method known in the art, including those described below, for efficacy in treating or preventing such diseases and disorders.

[0283] A vast array of animal and cell culture models exist for processes involved in atherosclerosis. A limited and non-exclusive list of animal models includes knockout mice for premature atherosclerosis (Kurabayashi and Yazaki, 1996, Int. Angiol. 15: 187-194), transgenic mouse models of atherosclerosis (Kappel et al., 1994, FASEB J. 8: 583-592), antisense oligonucleotide treatment of animal models (Callow, 1995, Curr. Opin. Cardiol. 10: 569-576), transgenic rabbit models for atherosclerosis (Taylor, 1997, Ann. N.Y. Acad. Sci 811: 146-152), hypercholesterolemic animal models (Rosenfeld, 1996, Diabetes Res. Clin. Pract. 30 Suppl.: 1-11), hyperlipidemic mice (Paigen et al, 1994, Curr. Opin. Lipidol. 5: 258-264), and inhibition of lipoxygenase in animals (Sigal et al., 1994, Ann. N.Y. Acad. Sci. 714: 211-224). In addition, in vitro cell models include but are not limited to monocytes exposed to low density lipoprotein (Frostegard et al., 1996, Atherosclerosis 121: 93-103), cloned vascular smooth muscle cells (Suttles et al., 1995, Exp. Cell Res. 218: 331-338), endothelial cell-derived chemoattractant exposed T cells (Katz et al., 1994, J. Leukoc. Biol. 55: 567-573), cultured human aortic endothelial cells (Farber et al., 1992, Am. J. Physiol. 262: H1088-1085), and foam cell cultures (Libby et al., 1996, Curr Opin Lipidol 7: 330-335). Potentially effective Therapeutics, for example but not by way of limitation, reduce foam cell formation in cell culture models, or reduce atherosclerotic plaque formation in hypercholesterolemic mouse models of atherosclerosis in comparison to controls.

[0284] Accordingly, once an atherosclerosis-associated disease or disorder has been shown to be amenable to treatment by modulation of activity or formation, that disease or disorder can be treated or prevented by administration of a Therapeutic that modulates activity.

[0285] Cytokine and Cell Proliferation/Differentiation Activity

[0286] An ORFX protein of the present invention may exhibit cytokine, cell proliferation (either inducing or inhibiting) or cell differentiation (either inducing or inhibiting) activity or may induce production of other cytokines in certain cell populations. Many protein factors discovered to date, including all known cytokines, have exhibited activity in one or more factor dependent cell proliferation assays, and hence the assays serve as a convenient confirmation of cytokine activity. The activity of a protein of the present invention is evidenced by any one of a number of routine factor dependent cell proliferation assays for cell lines including, without limitation, 32D, DA2, DA1G, T10, B9, B9/11, BaF3, MC9/G, M+(preB M+), 2E8, RB5, DA1, 123, T1165, HT2, CTLL2, TF-1, Mo7e and CMK.

[0287] The activity of a protein of the invention may, among other means, be measured by the following methods: Assays for T-cell or thymocyte proliferation include without limitation those described in: CURRENT PROTOCOLS IN IMMUNOLOGY, Ed by Coligan et al., Greene Publishing Associates and Wiley-Interscience (Chapter 3 and Chapter 7); Takai et al., J. Immunol 137:3494-3500, 1986; Bertagnoili et al., J Immunol 145:1706-1712, 1990; Bertagnolli et al., Cell Immunol 133:327-341, 1991; Bertagnolli, et al., J Immunol 149:3778-3783, 1992; Bowman et al., J Immunol 152:1756-1761, 1994.

[0288] Assays for cytokine production arid/or proliferation of spleen cells, lymph node cells or thymocytes include, without limitation, those described by Kruisbeek and Shevach, In: CURRENT PROTOCOLS IN IMMUNOLOGY. Coligan et al., eds. Vol 1, pp. 3.12.1-14, John Wiley and Sons, Toronto 1994; and by Schreiber, In: CURRENT PROTOCOLS IN IMMUNOLOGY. Coligan eds. Vol 1 pp. 6.8.1-8, John Wiley and Sons, Toronto 1994.

[0289] Assays for proliferation and differentiation of hematopoietic and lymphopoietic cells include, without limitation, those described by Bottomly et al., In: CURRENT PROTOCOLS IN IMMUNOLOGY. Coligan et al., eds. Vol 1 pp. 6.3.1-6.3.12, John Wiley and Sons, Toronto 1991; de Vries et al., J Exp Med 173:1205-1211, 1991 Moreau et al., Nature 336:690-692, 1988; Greenberger et al., Proc Natl Acad Sci U.S.A. 80:2931-2938, 1983; Nordan, In: CURRENT PROTOCOLS IN IMMUNOLOGY. Coligan et al, eds. Vol 1 pp. 6.6.1-5, John Wiley and Sons, Toronto 1991; Smith et al., Proc Natl Acad Sci U.S.A. 83:1857-1861, 1986; Measurement of human Interleukin 11-Bennett, et al. In: CURRENT PROTOCOLS IN IMMUNOLOGY. Coligan et al., eds. Vol 1 pp. 6.15.1 John Wiley and Sons, Toronto 1991; Ciarletta, et al., In: CURRENT PROTOCOLS IN IMMUNOLOGY. Coligan et al., eds. Vol 1 pp. 6.13.1, John Wiley and Sons, Toronto 1991.

[0290] Assays for T-cell clone responses to antigens (which will identify, among others, proteins that affect APC-T cell interactions as well as direct T-cell effects by measuring proliferation and cytokine production) include, without limitation, those described In: CURRENT PROTOCOLS IN IMMUNOLOGY. Coligan et al., eds., Greene Publishing Associates and Wiley-Interscience (Chapter 3Chapter 6, Chapter 7); Weinberger et al., Proc Natl Acad Sci USA 77:6091-6095, 1980; Weinberger et al., Eur J Immun 11:405-411, 1981; Takai et al., J Immunol 137:3494-3500, 1986; Takai et al., J Immunol 140:508-512, 1988.

[0291] Immune Stimulating or Suppressing Activity

[0292] An ORFX protein of the present invention may also exhibit immune stimulating or immune suppressing activity, including without limitation the activities for which assays are described herein. A protein may be useful in the treatment of various immune deficiencies and disorders (including severe combined immunodeficiency (SCID)), e.g., in regulating (up or down) growth and proliferation of T and/or B lymphocytes, as well as effecting the cytolytic activity of NK cells and other cell populations. These immune deficiencies may be genetic or be caused by vital (e.g., HIV) as well as bacterial or fungal infections, or may result from autoimmune disorders. More specifically, infectious diseases causes by vital, bacterial, fungal or other infection may be treatable using a protein of the present invention, including infections by HIV, hepatitis viruses, herpesviruses, mycobacteria, Leishmania species., malaria species. and various fungal infections such as candidiasis. Of course, in this regard, a protein of the present invention may also be useful where a boost to the immune system generally may be desirable, i.e., in the treatment of cancer.

[0293] Autoimmune disorders which may be treated using a protein of the present invention include, for example, connective tissue disease, multiple sclerosis, systemic lupus erythematosus, rheumatoid arthritis, autoimmune pulmonary inflammation, Guillain-Barre syndrome, autoimmune thyroiditis, insulin dependent diabetes mellitus, myasthenia gravis, graft-versus-host disease and autoimmune inflammatory eye disease. Such a protein of the present invention may also to be useful in the treatment of allergic reactions and conditions, such as asthma (particularly allergic asthma) or other respiratory problems. Other conditions, in which immune suppression is desired (including, for example, organ transplantation), may also be treatable using a protein of the present invention.

[0294] Using the proteins of the invention it may also be possible to immune responses, in a number of ways. Down regulation may be in the form of inhibiting or blocking an immune response already in progress or may involve preventing the induction of an immune response. The functions of activated T cells may be inhibited by suppressing T cell responses or by inducing specific tolerance in T cells, or both. Immunosuppression of T cell responses is generally an active, non-antigen-specific, process which requires continuous exposure of the T cells to the suppressive agent. Tolerance, which involves inducing non-responsiveness or energy in T cells, is distinguishable from immunosuppression in that it is generally antigen-specific and persists after exposure to the tolerizing agent has ceased. Operationally, tolerance can be demonstrated by the lack of a T cell response upon re-exposure to specific antigen in the absence of the tolerizing agent.

[0295] Down regulating or preventing one or more antigen functions (including without limitation B lymphocyte antigen functions (such as, for example, B7), e.g., preventing high level lymphokine synthesis by activated T cells, will be useful in situations of tissue, skin and organ transplantation and in graft-versus-host disease (GVHD). For example, blockage of T cell function should result in reduced tissue destruction in tissue transplantation. Typically, in tissue transplants, rejection of the transplant is initiated through its recognition as foreign by T cells, followed by an immune reaction that destroys the transplant. The administration of a molecule which inhibits or blocks interaction of a B7 lymphocyte antigen with its natural ligand(s) on immune cells (such as a soluble, monomeric form of a peptide having B7-2 activity alone or in conjunction with a monomeric form of a peptide having an activity of another B lymphocyte antigen (e.g., B7-1, B7-3) or blocking antibody), prior to transplantation can lead to the binding of the molecule to the natural ligand(s) on the immune cells without transmitting the corresponding costimulatory signal. Blocking B lymphocyte antigen function in this matter prevents cytokine synthesis by immune cells, such as T cells, and thus acts as an immunosuppressant. Moreover, the lack of costimulation may also be sufficient to energize the T cells, thereby inducing tolerance in a subject. Induction of long-term tolerance by B lymphocyte antigen-blocking reagents may avoid the necessity of repeated administration of these blocking reagents. To achieve sufficient immunosuppression or tolerance in a subject, it may also be necessary to block the function of B lymphocyte antigens.

[0296] The efficacy of particular blocking reagents in preventing organ transplant rejection or GVHD can be assessed using animal models that are predictive of efficacy in humans. Examples of appropriate systems which can be used include allogeneic cardiac grafts in rats and xenogeneic pancreatic islet cell grafts in mice, both of which have been used to examine the immunosuppressive effects of CTLA41g fusion proteins in vivo as described in Lenschow et al., Science 257:789-792 (1992) and Turka et al., Proc Natl Acad Sci USA, 89:11102-11105 (1992). In addition, murine models of GVHD (see Paul ed., FUNDAMENTAL IMMUNOLOGY, Raven Press, New York, 1989, pp. 846-847) can be used to determine the effect of blocking B lymphocyte antigen function in vivo on the development of that disease.

[0297] Blocking antigen function may also be therapeutically useful for treating autoimmune diseases. Many autoimmune disorders are the result of inappropriate activation of T cells that are reactive against self tissue and which promote the production of cytokines and auto-antibodies involved in the pathology of the diseases. Preventing the activation of autoreactive T cells may reduce or eliminate disease symptoms. Administration of reagents which block costimulation of T cells by disrupting receptor:ligand interactions of B lymphocyte antigens can be used to inhibit T cell activation and prevent production of auto-antibodies or T cell-derived cytokines which may be involved in the disease process. Additionally, blocking reagents may induce antigen-specific tolerance of autoreactive T cells which could lead to long-term relief from the disease. The efficacy of blocking reagents in preventing or alleviating autoimmune disorders can be determined using a number of well-characterized animal models of human autoimmune diseases. Examples include murine experimental autoimmune encephalitis, systemic lupus erythematosis in MRL/lpr/lpr mice or NZB hybrid mice, murine autoimmune collagen arthritis, diabetes mellitus in NOD mice and BB rats, and murine experimental myasthenia gravis (see Paul ed., FUNDAMENTAL IMMUNOLOGY, Raven Press, New York, 1989, pp. 840-856).

[0298] Upregulation of an antigen function (preferably a B lymphocyte antigen function), as a means of up regulating immune responses, may also be useful in therapy. Upregulation of immune responses may be in the form of enhancing an existing immune response or eliciting an initial immune response. For example, enhancing an immune response through stimulating B lymphocyte antigen function may be useful in cases of viral infection. In addition, systemic vital diseases such as influenza, the common cold, and encephalitis might be alleviated by the administration of stimulatory forms of B lymphocyte antigens systemically.

[0299] Alternatively, anti-viral immune responses may be enhanced in an infected patient by removing T cells from the patient, costimulating the T cells in vitro with viral antigen-pulsed APCs either expressing a peptide of the present invention or together with a stimulatory form of a soluble peptide of the present invention and reintroducing the in vitro activated T cells into the patient. Another method of enhancing anti-vital immune responses would be to isolate infected cells from a patient, transfect them with a nucleic acid encoding a protein of the present invention as described herein such that the cells express all or a portion of the protein on their surface, and reintroduce the transfected cells into the patient. The infected cells would now be capable of delivering a costimulatory signal to, and thereby activate, T cells in vivo.

[0300] In another application, up regulation or enhancement of antigen function (preferably B lymphocyte antigen function) may be useful in the induction of tumor immunity. Tumor cells (e.g., sarcoma, melanoma, lymphoma, leukemia, neuroblastoma, carcinoma) transfected with a nucleic acid encoding at least one peptide of the present invention can be administered to a subject to overcome tumor-specific tolerance in the subject. If desired, the tumor cell can be transfected to express a combination of peptides. For example, tumor cells obtained from a patient can be transfected ex vivo with an expression vector directing the expression of a peptide having B7-2-like activity alone, or in conjunction with a peptide having B7-l -like activity and/or B7-3-like activity. The transfected tumor cells are returned to the patient to result in expression of the peptides on the surface of the transfected cell. Alternatively, gene therapy techniques can be used to target a tumor cell for transfection in vivo.

[0301] The presence of the peptide of the present invention having the activity of a B lymphocyte antigen(s) on the surface of the tumor cell provides the necessary costimulation signal to T cells to induce a T cell mediated immune response against the transfected tumor cells. In addition, tumor cells which lack MHC class I or MHC class II molecules, or which fail to reexpress sufficient amounts of MHC class I or MHC class II molecules, can be transfected with nucleic acid encoding all or a portion of (e.g., a cytoplasmic-domain truncated portion) of an MHC class I α chain protein and β₂ microglobulin protein or an MHC class II a chain protein and an MHC class II β chain protein to thereby express MHC class I or MHC class II proteins on the cell surface. Expression of the appropriate class I or class II MHC in conjunction with a peptide having the activity of a B lymphocyte antigen (e.g., B7-1, B7-2, B7-3) induces a T cell mediated immune response against the transfected tumor cell. Optionally, a gene encoding an antisense construct which blocks expression of an MHC class II associated protein, such as the invariant chain, can also be cotransfected with a DNA encoding a peptide having the activity of a B lymphocyte antigen to promote presentation of tumor associated antigens and induce tumor specific immunity. Thus, the induction of a T cell mediated immune response in a human subject may be sufficient to overcome tumor-specific tolerance in the subject.

[0302] The activity of a protein of the invention may, among other means, be measured by the following methods: Suitable assays for thymocyte or splenocyte cytotoxicity include, without limitation, those described In: CURRENT PROTOCOLS IN IMMUNOLOGY. Coligan et al., eds. Greene Publishing Associates and Wiley-Interscience (Chapter 3, Chapter 7); Herrmann et al., Proc Natl Acad Sci USA 78:2488-2492, 1981; Herrmann et al., J Immunol 128:1968-1974, 1982; Handa et al., J Immunol 135:1564-1572, 1985; Takai et al, J Immunol 137:3494-3500, 1986; Takai et al., J Immunol 140:508-512, 1988; Herrmann et al, Proc Natl Acad Sci USA 78:2488-2492, 1981; Herrmann et al., J Immunol 128:1968-1974, 1982; Handa et al., J Immunol 135:1564-1572, 1985; Takai et al., J Immunol 137:3494-3500, 1986; Bowman et al., J Virology 61:1992-1998; Takai et al., J Immunol 140:508-512, 1988; Bertagnolli et al., Cell Immunol 133:327-341, 1991; Brown et al., J Immunol 153:3079-3092, 1994.

[0303] Assays for T-cell-dependent immunoglobulin responses and isotype switching (which will identify, among others, proteins that modulate T-cell dependent antibody responses and that affect Th1/Th2 profiles) include, without limitation, those described in: Maliszewski, J Immunol 144:3028-3033, 1990; and Mond and Brunswick In: CURRENT PROTOCOLS IN IMMUNOLOGY. Coligan et al, (eds.) Vol 1 pp. 3.8.1-3.8.16, John Wiley and Sons, Toronto 1994.

[0304] Mixed lymphocyte reaction (MLR) assays (which will identify, among others, proteins that generate predominantly Thl and CTL responses) include, without limitation, those described In: CURRENT PROTOCOLS IN IMMUNOLOGY. Coligan et al, eds. Greene Publishing Associates and Wiley-Interscience (Chapter 3, Chapter 7); Takai et al., J Immunol 137:3494-3500, 1986; Takai et al., J Immunol 140:508-512, 1988; Bertagnolli et al., J Immunol 149:3778-3783, 1992.

[0305] Dendritic cell-dependent assays (which will identify, among others, proteins expressed by dendritic cells that activate naive T-ceLls) include, without limitation, those described in: Guery et al., J Immunol 134:536-544, 1995; Inaba et al, J Exp Med 173:549-559, 1991; Macatonia et al., J Immunol 154:5071-5079, 1995; Porgador et al., J Exp Med 182:255-260, 1995; Nair et al., J Virol 67:4062-4069, 1993; Huang et al, Science 264:961-965, 1994; Macatonia et al, J Exp Med 169:1255-1264, 1989; Bhardwaj et al., J Clin Investig 94:797-807, 1994; and Inaba et al., J Exp Med 172:631-640, 1990.

[0306] Assays for lymphocyte survival/apoptosis (which will identify, among others, proteins that prevent apoptosis after superantigen induction and proteins that regulate lymphocyte homeostasis) include, without limitation, those described in: Darzynkiewicz et al., Cytometry 13:795-808, 1992; Gorczyca et al., Leukemia 7:659-670, 1993; Gorczyca et al., Cancer Res 53:1945-1951, 1993; Itoh et al., Cell 66:233-243, 1991; Zacharchuk, J Immunol 145:4037-4045, 1990; Zamai et al., Cytometry 14:891-897, 1993; Gorczyca et al., Internat J Oncol 1:639-648, 1992.

[0307] Assays for proteins that influence early steps of T-cell commitment and development include, without limitation, those described in: Antica et al., Blood 84:111-117, 1994; Fine et al., Cell Immunol 155: 111-122, 1994; Galy et al., Blood 85:2770-2778,1995; Toki et al., Proc NatAcadSci USA 88:7548-7551, 1991.

[0308] Hematopoiesis Regulating Activity

[0309] An ORFX protein of the present invention may be useful in regulation of hematopoiesis and, consequently, in the treatment of myeloid or lymphoid cell deficiencies. Even marginal biological activity in support of colony forming cells or of factor-dependent cell lines indicates involvement in regulating hematopoiesis, e.g. in supporting the growth and proliferation of erythroid progenitor cells alone or in combination with other cytokines, thereby indicating utility, for example, in treating various anemias or for use in conjunction with irradiation/chemotherapy to stimulate the production of erythroid precursors and/or erythroid cells; in supporting the growth and proliferation of mycloid cells such as granulocytes and monocytes/macrophages (i.e., traditional CSF activity) useful, for example, in conjunction with chemotherapy to prevent or treat consequent myelo-suppression; in supporting the growth and proliferation of megakaryocytes and consequently of platelets thereby allowing prevention or treatment of various platelet disorders such as thrombocytopenia, and generally for use in place of or complimentary to platelet transfusions; and/or in supporting the growth and proliferation of hematopoietic stem cells which are capable of maturing to any and all of the above-mentioned hematopoietic cells and therefore find therapeutic utility in various stem cell disorders (such as those usually treated with transplantation, including, without limitation, aplastic anemia and paroxysmal nocturnal hemoglobinuria), as well as in repopulating the stem cell compartment post irradiation/chemotherapy, either in-vivo or ex-vivo (i.e., in conjunction with bone marrow transplantation or with peripheral progenitor cell transplantation (homologous or heterologous)) as normal cells or genetically manipulated for gene therapy.

[0310] The activity of a protein of the invention may, among other means, be measured by the following methods:

[0311] Suitable assays for proliferation and differentiation of various hematopoietic lines are cited above.

[0312] Assays for embryonic stem cell differentiation (which will identify, among others, proteins that influence embryonic differentiation hematopoiesis) include, without limitation, those described in: Johansson et al. Cellular Biology 15:141-151, 1995; Keller et al., Mol. Cell. Biol. 13:473-486, 1993; McClanahan et al., Blood 81:2903-2915, 1993.

[0313] Assays for stem cell survival and differentiation (which will identify, among others, proteins that regulate lympho-hematopoiesis) include, without limitation, those described in: Methylcellulose colony forming assays, Freshney, In: CULTURE OF HEMATOPOIETIC CELLS. Freshney, et al. (eds.) Vol pp. 265-268, Wiley-Liss, Inc., New York, N.Y 1994; Hirayama et al., Proc Natl Acad Sci USA 89:5907-5911, 1992; McNiece and Briddeli, In: CULTURE OF HEMATOPOIETIC CELLS. Freshney, et al. (eds.) Vol pp. 23-39, Wiley-Liss, Inc., New York, N.Y. 1994; Neben et al., Exp Hematol 22:353-359, 1994; Ploemacher, In: CULTURE OF HEMATOPOIETIC CELLS. Freshney, et al. eds. Vol pp. 1-21, Wiley-Liss, Inc., New York, N.Y. 1994; Spoonceret al., In: CULTURE OF HEMATOPOIETIC CELLS. Freshhey, et al., (eds.) Vol pp. 163-179, Wiley-Liss, Inc., New York, N.Y. 1994; Sutherland, In: CULTURE OF HEMATOPOIETIC CELLS. Freshney, et al., (eds.) Vol pp. 139-162, Wiley-Liss, Inc., New York, N.Y. 1994.

[0314] Tissue Growth Activity

[0315] An ORFX protein of the present invention also may have utility in compositions used for bone, cartilage, tendon, ligament and/or nerve tissue growth or regeneration, as well as for wound healing and tissue repair and replacement, and in the treatment of bums, incisions and ulcers.

[0316] A protein of the present invention, which induces cartilage and/or bone growth in circumstances where bone is not normally formed, has application in the healing of bone fractures and cartilage damage or defects in humans and other animals. Such a preparation employing a protein of the invention may have prophylactic use in closed as well as open fracture reduction and also in the improved fixation of artificial joints. De novo bone formation induced by an osteogenic agent contributes to the repair of congenital, trauma induced, or oncologic resection induced craniofacial defects, and also is useful in cosmetic plastic surgery.

[0317] A protein of this invention may also be used in the treatment of periodontal disease, and in other tooth repair processes. Such agents may provide an environment to attract bone-forming cells, stimulate growth of bone-forming cells or induce differentiation of progenitors of bone-forming cells. A protein of the invention may also be useful in the treatment of osteoporosis or osteoarthritis, such as through stimulation of bone and/or cartilage repair or by blocking inflammation or processes of tissue destruction (collagenase activity, osteoclast activity, etc.) mediated by inflammatory processes.

[0318] Another category of tissue regeneration activity that may be attributable to the protein of the present invention is tendon/ligament formation. A protein of the present invention, which induces tendon/ligament-like tissue or other tissue formation in circumstances where such tissue is not normally formed, has application in the healing of tendon or ligament tears, deformities and other tendon or ligament defects in humans and other animals. Such a preparation employing a tendon/ligament-like tissue inducing protein may have prophylactic use in preventing damage to tendon or ligament tissue, as well as use in the improved fixation of tendon or ligament to bone or other tissues, and in repairing defects to tendon or ligament tissue. De novo tendon/ligament-like tissue formation induced by a composition of the present invention contributes to the repair of congenital, trauma induced, or other tendon or ligament defects of other origin, and is also useful in cosmetic plastic surgery for attachment or repair of tendons or ligaments. The compositions of the present invention may provide an environment to attract tendon- or ligament-forming cells, stimulate growth of tendon- or ligament-forming cells, induce differentiation of progenitors of tendon- or ligament-forming cells, or induce growth of tendon/ligament cells or progenitors ex vivo for return in vivo to effect tissue repair. The compositions of the invention may also be useful in the treatment of tendonitis, carpal tunnel syndrome and other tendon or ligament defects. The compositions may also include an appropriate matrix and/or sequestering agent as a career as is well known in the art.

[0319] The protein of the present invention may also be useful for proliferation of neural cells and for regeneration of nerve and brain tissue, i.e. for the treatment of central and peripheral nervous system diseases and neuropathies, as well as mechanical and traumatic disorders, which involve degeneration, death or trauma to neural cells or nerve tissue. More specifically, a protein may be used in the treatment of diseases of the peripheral nervous system, such as peripheral nerve injuries, peripheral neuropathy and localized neuropathies, and central nervous system diseases, such as Alzheimer's, Parkinson's disease, Huntington's disease, amyotrophic lateral sclerosis, and Shy-Drager syndrome. Further conditions which may be treated in accordance with the present invention include mechanical and traumatic disorders, such as spinal cord disorders, head trauma and cerebrovascular diseases such as stroke. Peripheral neuropathies resulting from chemotherapy or other medical therapies may also be treatable using a protein of the invention.

[0320] Proteins of the invention may also be useful to promote better or faster closure of non-healing wounds, including without limitation pressure ulcers, ulcers associated with vascular insufficiency, surgical and traumatic wounds, and the like.

[0321] It is expected that a protein of the present invention may also exhibit activity for generation or regeneration of other tissues, such as organs (including, for example, pancreas, liver, intestine, kidney, skin, endotheliurn), muscle (smooth, skeletal or cardiac) and vascular (including vascular endothelium) tissue, or for promoting the growth of cells comprising such tissues. Part of the desired effects may be by inhibition or modulation of fibrotic scarring to allow normal tissue to regenerate. A protein of the invention may also exhibit angiogenic activity.

[0322] A protein of the present invention may also be useful for gut protection or regeneration and treatment of lung or liver fibrosis, reperfusion injury in various tissues, and conditions resulting from systemic cytokine damage.

[0323] A protein of the present invention may also be useful for promoting or inhibiting differentiation of tissues described above from precursor tissues or cells; or for inhibiting the growth of tissues described above.

[0324] The activity of a protein of the invention may, among other means, be measured by the following methods:

[0325] Assays for tissue generation activity include, without limitation, those described in: International Patent Publication No. WO95/16035 (bone, cartilage, tendon); International Patent Publication No. WO95/05846 (nerve, neuronal); International Patent Publication No. WO91/07491 (skin, endothelium).

[0326] Assays for wound healing activity include, without limitation, those described in: Winter, EPIDERMAL WOUND HEALING, pp. 71-112 (Maibach and Rovee, eds.), Year Book Medical Publishers, Inc., Chicago, as modified by Eaglstein and Menz, J Invest. Dermatol 71:382-84 (1978).

[0327] Activin/Inhibin Activity

[0328] An ORFX protein of the present invention may also exhibit activin- or inhibin-related activities. Inhibins are characterized by their ability to inhibit the release of follicle stimulating hormone (FSH), while activins and are characterized by their ability to stimulate the release of follicle stimulating hormone (FSH). Thus, a protein of the present invention, alone or in heterodimers with a member of the inhib in a family, may be useful as a contraceptive based on the ability of inhibins to decrease fertility in female mammals and decrease spermatogenesis in male mammals. Administration of sufficient amounts of other inhibins can induce infertility in these mammals. Alternatively, the protein of the invention, as a homodimer or as a heterodimer with other protein subunits of the inhibin-lb group, may be useful as a fertility inducing therapeutic, based upon the ability of activin molecules in stimulating FSH release from cells of the anterior pituitary. See, for example, U.S. Pat. No. 4,798,885. A protein of the invention may also be useful for advancement of the onset of fertility in sexually immature mammals, so as to increase the lifetime reproductive performance of domestic animals such as cows, sheep and pigs.

[0329] The activity of a protein of the invention may, among other means, be measured by the following methods:

[0330] Assays for activin/inhibin activity include, without limitation, those described in: Vale et al, Endocrinology 91:562-572, 1972; Ling et al., Nature 321:779-782, 1986; Vale et al., Nature 321:776-779, 1986; Mason et al., Nature 318:659-663, 1985; Forage et al., Proc Natl AcadSci USA 83:3091-3095, 1986.

[0331] Chemotactic/Chemokinetic Activity

[0332] A protein of the present invention may have chemotactic or chemokinetic activity (e.g., act as a chemokine) for mammalian cells, including, for example, monocytes, fibroblasts, neutrophils, T-cells, mast cells, eosinophils, epithelial and/or endothelial cells. Chemotactic and chemokinetic proteins can be used to mobilize or attract a desired cell population to a desired site of action. Chemotactic or chemokinetic proteins provide particular advantages in treatment of wounds and other trauma to tissues, as well as in treatment of localized infections. For example, attraction of lymphocytes, monocytes or neutrophils to tumors or sites of infection may result in improved immune responses against the tumor or infecting agent.

[0333] A protein or peptide has chemotactic activity for a particular cell population if it can stimulate, directly or indirectly, the directed orientation or movement of such cell population. Preferably, the protein or peptide has the ability to directly stimulate directed movement of cells. Whether a particular protein has chemotactic activity for a population of cells can be readily determined by employing such protein or peptide in any known assay for cell chemotaxis.

[0334] The activity of a protein of the invention may, among other means, be measured by following methods:

[0335] Assays for chemotactic activity (which will identify proteins that induce or prevent chemotaxis) consist of assays that measure the ability of a protein to induce the migration of cells across a membrane as well as the ability of a protein to induce the adhesion of one cell population to another cell population. Suitable assays for movement and adhesion include, without limitation. those described in: CURRENT PROTOCOLS IN IMMUNOLOGY, Coligan et al., eds. (Chapter 6.12, MEASUREMENT OF ALPHA AND BETA CHEMOKINES 6.12.1-6.12.28); Taub et al. J Clin Invest 95:1370-1376, 1995; Lind et al. APMIS 103:140-146, 1995; Muller et al., Eur J Immunol 25: 1744-1748; Gruberet al. J. Immunol 152:5860-5867, 1994; Johnston et al., J Immunol 153: 1762-1768, 1994.

[0336] Hemostatic and Thrombolytic Activity

[0337] A protein of the invention may also exhibit hemostatic or thrombolytic activity. As a result, such a protein is expected to be useful in treatment of various coagulation disorders (including hereditary disorders, such as hemophilias) or to enhance coagulation and other hemostatic events in treating wounds resulting from trauma, surgery or other causes. A protein of the invention may also be useful for dissolving or inhibiting formation of thromboses and for treatment and prevention of any resulting conditions (such as, for example, infarction of cardiac and central nervous system vessels (e.g., stroke).

[0338] The activity of a protein of the invention may, among other means, be measured by the following methods:

[0339] Assay for hemostatic and thrombolytic activity include, without limitation, those described in: Linet et al., J Clin. Pharmacol. 26:131-140, 1986; Burdick et al., Thrombosis Res. 45:413-419, 1987; Humphrey et al., Fibrinolysis 5:71-79 (1991); Schaub, Prostaglandins 35:467-474, 1988.

[0340] Receptor/Ligand Activity

[0341] A protein of the present invention may also demonstrate activity as receptors, receptor ligands or inhibitors or agonists of receptor/ligand interactions. Examples of such receptors and ligands include, without limitation, cytokine receptors and their ligands, receptor kinases and their ligands, receptor phosphatases and their ligands, receptors involved in cell—cell interactions and their ligands (including without limitation, cellular adhesion molecules (such as selecting, integrins and their ligands) and receptor/ligand pairs involved in antigen presentation, antigen recognition and development of cellular and humoral immune responses). Receptors and ligands are also useful for screening of potential peptide or small molecule inhibitors of the relevant receptor/ligand interaction. A protein of the present invention (including, without limitation, fragments of receptors and ligands) may themselves be useful as inhibitors of receptor/ligand interactions.

[0342] The activity of a protein of the invention may, among other means, be measured by the following methods:

[0343] Suitable assays for receptor-ligand activity include without limitation those described in: CURRENT PROTOCOLS IN IMMUNOLOGY, Ed by Coligan, et al., Greene Publishing Associates and Wiley-Interscience (Chapter 7.28, Measurement of Cellular Adhesion under static conditions 7.28.1-7.28.22), Takai et al., Proc Natl Acad Sci USA 84:6864-6868, 1987; Bierer et al., J. Exp. Med. 168:1145-1156, 1988; Rosenstein et al., J Exp. Med. 169:149-160:1989; Stoltenborg et al., J Immunol Methods 17:5:59-68, 1994; Stitt et al., Cell 80:661-670, 1995.

[0344] Anti-inflammatory Activity

[0345] Proteins of the present invention may also exhibit anti-inflammatory activity. The anti-inflammatory activity may be achieved by providing a stimulus to cells involved in the inflammatory response, by inhibiting or promoting cell—cell interactions (such as, for example, cell adhesion), by inhibiting or promoting chemotaxis of cells involved in the inflammatory process, inhibiting or promoting cell extravasation, or by stimulating or suppressing production of other factors which more directly inhibit or promote an inflammatory response. Proteins exhibiting such activities can be used to treat inflammatory conditions including chronic or acute conditions), including without limitation inflammation associated with infection (such as septic shock, sepsis or systemic inflammatory response syndrome (SIRS)), ischemia-reperfusion injury, endotoxin lethality, arthritis, complement-mediated hyperacute rejection, nephritis, cytokine or chemokine-induced lung injury, inflammatory bowel disease, Crohn's disease or resulting from over production of cytokines such as TNF or IL-1. Proteins of the invention may also be useful to treat anaphylaxis and hypersensitivity to an antigenic substance or material.

[0346] Tumor Inhibition Activity

[0347] In addition to the activities described above for immunological treatment or prevention of tumors, a protein of the invention may exhibit other anti-tumor activities. A protein may inhibit tumor growth directly or indirectly (such as, for example, via ADCC). A protein may exhibit its tumor inhibitory activity by acting on tumor tissue or tumor precursor tissue, by inhibiting formation of tissues necessary to support tumor growth (such as, for example, by inhibiting angiogenesis), by causing production of other factors, agents or cell types which inhibit tumor growth, or by suppressing, eliminating or inhibiting factors, agents or cell types which promote tumor growth.

[0348] Other Activities

[0349] A protein of the invention may also exhibit one or more of the following additional activities or effects: inhibiting the growth, infection or function of, or killing, infectious agents, including, without limitation, bacteria, viruses, fungi and other parasites; effecting (suppressing or enhancing) bodily characteristics, including, without limitation, height, weight, hair color, eye color, skin, fat to lean ratio or other tissue pigmentation, or organ or body part size or shape (such as, for example, breast augmentation or diminution, change in bone form or shape); effecting biorhythms or circadian cycles or rhythms; effecting the fertility of male or female subjects; effecting the metabolism, catabolism, anabolism, processing, utilization, storage or elimination of dietary fat, lipid, protein, carbohydrate, vitamins, minerals, cofactors or other nutritional factors or component(s); effecting behavioral characteristics, including, without limitation, appetite, libido, stress, cognition (including cognitive disorders), depression (including depressive disorders) and violent behaviors; providing analgesic effects or other pain reducing effects; promoting differentiation and growth of embryonic stem cells in lineages other than hematopoietic lineages; hormonal or endocrine activity; in the case of enzymes, correcting deficiencies of the enzyme and treating deficiency-related diseases; treatment of hyperproliferative disorders (such as, for example, psoriasis); immunoglobulin-like activity (such as, for example, the ability to bind antigens or complement); and the ability to act as an antigen in a vaccine composition to raise an immune response against such protein or another material or entity which is cross-reactive with such protein.

[0350] Neural disorders in general include Parkinson's disease, Alzheimer's disease, Huntington's disease, multiple sclerosis, amyotrophic lateral sclerosis (ALS), peripheral neuropathy, tumors of the nervous system, exposure to neurotoxins, acute brain injury, peripheral nerve trauma or injury, and other neuropathies, epilepsy, and/or tremors.

### EQUIVALENTS

[0351] From the foregoing detailed description of the specific embodiments of the invention, it should be apparent that particular novel compositions and methods involving nucleic acids, polypeptides, antibodies, detection and treatment have been described. Although these particular embodiments have been disclosed herein in detail, this has been done by way of example for purposes of illustration only, and is not intended to be limiting with respect to the scope of the appended claims that follow. In particular, it is contemplated by the inventors that various substitutions, alterations, and modifications may be made as a matter of routine for a person of ordinary skill in the art to the invention without departing from the spirit and scope of the invention as defined by the claims. Indeed, various modifications of the invention in addition to those described herein will become apparent to those skilled in the art from the foregoing description and accompanying figures. Such modifications are intended to fall within the scope of the appended claims.

The application's sequence listing, which the Patent Office published only in electronic form, follows.

SEQUENCE LISTING (2125 sequences)

SEQ ID NO: 1 - DNA, 771 bp, Homo sapiens
ggatccccgagtgcctgtggtgcccaagagctatgaatctgctatcatcaacacagagggtaccttctgaatgggctatgtctacagtgatgctgcaaatggaagctaaccctaggatgactggcctctgacacttgagccatcccatcatctgtcatgggttgacccatccatcccctcaatgagcctgaccttcaggaccactgacagaggagcagtcaatagaaattaattgttaaatacccagaaaatctgaaatggtatttaatatgcagttcatcaagagcaaaagttccttaaatcttcatctagaaaagttatttataagggatgaatatgttgtatgaatatgttgtatgcaaatattatattcaagggcaagaccatgaaaacagtttaagaatccgacagggaattggataaagacatcggagtgcacttgtcaaaatacagctatcaagaatgatgatgttgaaaaatagtttagcaatataattgtctagaaccacagggagtctgagattttacccaacttgtgagttaacaactctgctatagcttcatgaaagaagacacaagactcctgggtcaggaacaaaggtctctaatactcacagcaatatcaggagccagaatttcaggatcctttttcctgccagtttctcaagtcctaattaccaccgagttacaggaaagggccaggtaacactagcactgccatcagtggctgtattacagaacaggaactccaagcttaggaaacccagatcg

SEQ ID NO: 2 - protein, 50 aa, Homo sapiens
MMGWLKCQRPVILGLASICSITVDIAHSEGTLCVDDSRFIALGHHRHSGI

SEQ ID NO: 3 - DNA, 374 bp, Homo sapiens
  misc_feature (48): wherein any n is one of a or t or g or c
tgatcaaattccagagcaccgacgtcccggctggtgcgaagcacatcnaaaccaacatgcatccgctccaaggcgacgagttgacggccgaccctaaccaacctgacatcccacagccgccgcacgacaccgacggtaagccagtactgtccaccaacgaccatcccatcgactggctggatcatgaggttgagctcgtcgtggaaaaacttctcctcgaagttgcgggcatgaagattgcggcgagtgtcgaaagtctcgacgtcgccaccgcgtcgcaccgacagcaggtctgacggaacactagacagtccgtcgaatggaactgcccccctcgacagaggccaaacggcggtcttcgccaaccagtcgac

SEQ ID NO: 4 - protein, 79 aa, Homo sapiens
MHPLQGDELTADPNQPDIPQPPHDTDGKPVLSTNDHPIDWLDHEVELVVEKLLLEVAGMKIAASVESLDVATASHRQQV

SEQ ID NO: 5 - DNA, 264 bp, Homo sapiens
ctagacgccactaagaacattcatgattcatgggaggaggtcaaagtgtcagcatgaacaggcgtttggaagaggttcattccaatcctcatggatgactttcagggattccagccttcagtgaaggaagtcactgcagatgtaataggaatagatgtgagaccaattactgctaaaatgcctgggatatgctcctttcgtcttagaaagtggcttgttcttagatgtagcaatgcacacactttgagacacattttcccatgg

SEQ ID NO: 6 - protein, 69 aa, Homo sapiens
TGVWKRFIPILMDDFQGFQPSVKEVTADVIGIDVRPITAKMPGICSFRLRKWLVLRCSNAHTLRHIFPW

SEQ ID NO: 7 - DNA, 398 bp, Homo sapiens
gtgcacgagaccgaaggcgcgagcccgattctgcgggatgacccggtcatggacgactatgagcgggaagtgtttggcttgctggttcgcaagggcgacctcaacgccatcctgcaaaagatcgacgagtgcctggcgctgtccctcgaatccctgggcggtgcaaacaccgtgatgggccgcgagctgcaacggctcgcggtggatgtgcgccaagcgacgacactcgaagaactcaatgccccgctcaacgcactcaaggattatctgaaagccatcctgtaacgcctgagttaccgccgcccctctaccgccatgcgcacagccaggcccatcagcaccgagcccatcaaccaacgctgcacggtttgccagacgggcttgcggatgaaaaaccc

SEQ ID NO: 8 - protein, 78 aa, Homo sapiens
MDDYEREVFGLLVRKGDLNAILQKIDECLALSLESLGGANTVMGRELQRLAVDVRQATTLEELNAPLNALKDYLKAIL

SEQ ID NO: 9 - DNA, 445 bp, Homo sapiens
  misc_feature (1)..(2): wherein any n is one of a or t or g or c
nnacgcgtcagagagatctgtgtgtcgggaggggtgcccctcatcattgatgaccgcgtacatctcgttgccgaaattggggccgatggtgtccatgttgggcagtctgacatgccggtcgaccaggcccgtgcgattctgggcgacgatctactcatcggcttgtccgctcagactcccgcccatgtggaggccgccctgtcccaggggcgtgacatcgtcgactatttgggagttggcgccctgcacggcactggaaccaaacctgaggctggggagctcggcctggctgggatgcgcgatgtcgtcaacgccagcccatggccggtgtgcgtcatcggtggggtgagcgcatccgatgctcaagacgtagcccgagtgggatgtgacggcctgagcgtcgtctcggcgatttgccggagtaccgaccccaagtccagtgcac

SEQ ID NO: 10 - protein, 148 aa, Homo sapiens
  VARIANT (1): wherein Xaa may be any one of Ala or Arg or Glu or Gln or Gly or Ile or Leu or Lys or Pro or Ser or Thr or Val
XRVREICVSGGVPLIIDDRVHLVAEIGADGVHVGQSDMPVDQARAILGDDLLIGLSAQTPAHVEAALSQGRDIVDYLGVGALHGTGTKPEAGELGLAGMRDVVNASPWPVCVIGGVSASDAQDVARVGCDGLSVVSAICRSTDPKSSA

SEQ ID NO: 11 - DNA, 384 bp, Homo sapiens
  misc_feature (1)..(41): wherein any n is one of a or t or g or c
nnccgccttgcctgncggcgtctcctcgtcgccgggagcgncgaggaaggattaacgatgaccagcgacgtccccgggattggctcgaacgccgccactctggcgcgttcccaggctcgcagtgacaaggtcgaggctgatttggcggtccatcccgacaagtggcgcattcttaccggggaccgtcctactggcagcctgcacatcggtcactacttcgggtcgctggcgaatcgggtacgcctgcagaacaagggcattgagtctttccttgtcgtcgctgactaccaggttatctatgaccgcgacggggttggtgacctgcaggccaatgttatgtcgaatgtcgccgattacctggcaatcggcattgacccaacgcgt

SEQ ID NO: 12 - protein, 128 aa, Homo sapiens
  VARIANT (1): wherein Xaa may be any one of Phe or Ser or Tyr or Cys or Leu or Pro or His or Arg or Ile or Thr or Asn or Val or Ala or Gly
  VARIANT (5): wherein Xaa may be any one of Cys or Trp
  VARIANT (14): wherein Xaa may be any one of Val or Ala or Asp or Gly
XRLAXRRLLVAGSXEEGLTMTSDVPGIGSNAATLARSQARSDKVEADLAVHPDKWRILTGDRPTGSLHIGHYFGSLANRVRLQNKGIESFLVVADYQVIYDRDGVGDLQANVMSNVADYLAIGIDPTR

SEQ ID NO: 13 - DNA, 342 bp, Homo sapiens
  misc_feature (269): wherein any n is one of a or t or g or c
ggatccatcggggtggtttcgcagcgggtggagttgttgaatgcttctattgctgacaatttgaggttggtggctcctgatgctggtgatggtgagttgtggcgtgttcttggtgaggttggtttggctggtgaggtgcgtggtatggaggctgggttgcgtaccgttgttgggccggctggtacgaggctttcggggggtcaggctcagcggttaacagtggccacggtgattctgcagcggccgagggtccttattcttgatgagtntactgcgtctgtagatcctgatttggcagttgagattcgtgtgaatttggcgcggtgtttgcctggggtcact

SEQ ID NO: 14 - protein, 114 aa, Homo sapiens
  VARIANT (90): wherein Xaa may be any one of Cys or Phe or Ser or Tyr
GSIGVVSQRVELLNASIADNLRLVAPDAGDGELWRVLGEVGLAGEVRGMEAGLRTVVGPAGTRLSGGQAQRLTVATVILQRPRVLILDEXTASVDPDLAVEIRVNLARCLPGVT

SEQ ID NO: 15 - DNA, 346 bp, Homo sapiens
  misc_feature (1): wherein any n is one of a or t or g or c
ngtcgacgcctgcttgctgagccgtcaacgcgagtgttggcgacgtgtcgcgaggccattggcgagggcttttcctatgagatgttccagggccaggtcgaagtggcatcgccggtgtttgacgatgccgcacacgctgtcacctaccttggccgcgtgcgccgagaactgaaccaggcattggccgaacacgggctggggtttatctgcagtggcgcgcaccccatggccgagtggcaggcgcaacgggctaccccgcaggcgcatttccagcggttgttcgatgagttccgaatcgtcgcgcagcgtagtgtgctcagcggtatgcacgttcacgcagagatct

SEQ ID NO: 16 - protein, 115 aa, Homo sapiens
  VARIANT (1): wherein Xaa may be any one of Cys or Arg or Gly or Ser
XRRLLAEPSTRVLATCREAIGEGFSYEMFQGQVEVASPVFDDAAHAVTYLGRVRRELNQALAEHGLGFICSGAHPMAEWQAQRATPQAHFQRLFDEFRIVAQRSVLSGMHVHAEI

SEQ ID NO: 17 - DNA, 371 bp, Homo sapiens
cagagaagggaggagcgtctgcccatgcgtttgcgcgagttggtcgagcacgtcacgaagaagccggttgagccgcatgtgcggcacctcagtatcgagatcatggctgacgatctgaacggtgaggatgtagaagtgcccactgtttccgtgcgcatcaagtaatcgtctggaagatgtcgagggcgacggcaagtacctgtttttgtagtggctccatagacgttgccttgtgctgtgcctgcacaaattctcgtacagcaggaagcaggtgcgaaagacatgtacggacttggtcggagcgcgacggacccagccaggcggcatactgcgtgaggctcgaaatgatcgtcatcacacggagagctagc

SEQ ID NO: 18 - protein, 54 aa, Homo sapiens
QRREERLPMRLRELVEHVTKKPVEPHVRHLSIEIMADDLNGEDVEVPTVSVRIK

SEQ ID NO: 19 - DNA, 358 bp, Homo sapiens
  misc_feature (1)..(297): wherein any n is one of a or t or g or c
nngtgcaccccagaagnagagagaaagagagcaagtaactnggaaaacatatntgaannattnatccacaaanatttcctcaacctcaccagagagatcaacatgcanattcagaanattcagagaactcttgcaagatactgtacaaaatgatcatccccatgacacatcgtcatcatattctccaaggtccacnacacacaaaaaatattaatggcagctagacggaaatggaagcttacttataaagggaactccttcaagctaatagccagcctttcagaaaaaaacctacanagccagaagagttgggggcccatattcaccattgtttaagaaaagaaattccaggcctagg

SEQ ID NO: 20 - protein, 56 aa, Homo sapiens
  VARIANT (11): wherein Xaa may be any one of Asn or Asp or His or Tyr
  VARIANT (44): wherein Xaa may be any one of His or Gln
HIVIIFSKVHXTQKILMAARRKWKLTYKGNSFKLIASLSEKNLXSQKSWGPIFTIV

SEQ ID NO: 21 - DNA, 297 bp, Homo sapiens
caattgctcaccacctacggcgtgcgcgtggcgcaggtcggcatcgagcgcctgacgttgccgttggtgacccttacggccacggttgaccgcatgcgcgccgagcgcgaaaccatcgccaccgaacgcaccgccgtgggcaagcgcgaagcggcgcagatccgctctgccgccgagcgagatgcgcgcatcatgcaggccgatgccatcgtgaaagccgctgacatcgaagcgcagtcgcgggttgaagctgcgcagatttatggccgtgcctacgctggcaatccgcagctgtac

SEQ ID NO: 22 - protein, 99 aa, Homo sapiens
QLLTTYGVRVAQVGIERLTLPLVTLTATVDRMRAERETIATERTAVGKREAAQIRSAAERDARIMQADAIVKAADIEAQSRVEAAQIYGRAYAGNPQLY

SEQ ID NO: 23 - DNA, 431 bp, Homo sapiens
tcggcggtggcctatcaccggttgacgcgacacgctcaaaccctcaacgtccttggggcgaccggtggttaattcctaatgtcccacccgtcccggaaacgccgggatcgaagccccgatgcctttaatggcgagaggaagtcacaccgtgatccgccccaagcgctcagtcctaggtgctgccgccaccatcgccctcacctccggtatcagcgttgttgcgccggccgtcattggctcggtcgcacacgcagcaaatacgcagacgatgtacacgaccgcggacgtcaacgtgcggtctgcctcctccaacaccggcagggtgctcactgtcgcggcacgcggccagtcggttaaggtcaccggcgagaaggtgcgcgggttggtccccgttgccgtccatggcaccagcggctggatcgctgcatgga

SEQ ID NO: 24 - protein, 104 aa, Homo sapiens
MPLMARGSHTVIRPKRSVLGAAATIALTSGISVVAPAVIGSVAHAANTQTMYTTADVNVRSASSNTGRVLTVAARGQSVKVTGEKVRGLVPVAVHGTSGWIAAW

SEQ ID NO: 25 - DNA, 375 bp, Homo sapiens
cgcgtgtcccttggatacttgtcggaggtggagcgaggccagaaagaagcttctagcgagcttatctcggccatctgtactgctctggatcttcctcagtccgatctcatgcgcattgtcagtgacaagatgctcaagaacgaagacgccccggaacatcgcatcactgttgcggcttgaacgtaccaagcttgtcaggttcccggtcccgggggccgggaacgtctacatttagacaagacagcggatagttagcgccctagcgggtggctgaggggccgtcagtcgataggcgcgtggacgattcgaatcgcgataccaagcgcgcgcagccgggctagttcttcggggtcagcagagtcgtctgtaatgagg

SEQ ID NO: 26 - protein, 59 aa, Homo sapiens
RVSLGYLSEVERGQKEASSELISAICTALDLPQSDLMRIVSDKMLKNEDAPEHRITVAA

SEQ ID NO: 27 - DNA, 362 bp, Homo sapiens
  misc_feature (28)..(331): wherein any n is one of a or t or g or c
caggactatctcgattcttggcccggancgctgatcgtcgttncccacgacaggtggttcctggagcgggtctgcgacgtcgtttgggccctcatgggagatggcacggtggccttcctcccaggaggaatttcccaatacctagagcaccgccgcaaccgtaaacccagcccgtcgaaatcaagccgggtaggcagtacctcccaggtcgccgagccaaagatgggtgccgccgagctgcgtcaggcccgtaagaacatggacaggctcgatcgtcagatgggaaaggtccgcgatgagctagctgccctgcatgaggaaatggccgccnaggccgacgactaccaagccctggtagatct

SEQ ID NO: 28 - protein, 120 aa, Homo sapiens
  VARIANT (10): wherein Xaa may be any one of Ala or Pro or Ser or Thr
  VARIANT (15): wherein Xaa may be any one of Ala or Pro or Ser or Thr
  VARIANT (111): wherein Xaa may be any one of Glu or Gln or Lys
QDYLDSWPGXLIVVXHDRWFLERVCDVVWALMGDGTVAFLPGGISQYLEHRRNRKPSPSKSSRVGSTSQVAEPKMGAAELRQARKNMDRLDRQMGKVRDELAALHEEMAAXADDYQALVD

SEQ ID NO: 29 - DNA, 384 bp, Homo sapiens
  misc_feature (118): wherein any n is one of a or t or g or c
gtcgacatcgacaaggtccatgacggttccagcctcatcgacatcctcacctaccgcgagacggtgatgcgaggacgtcgggtcttcctcgacttccgcatcaaccagccggctgggnatccgaatctgcttgacgacgaggctcgcggatacctggagtctgcaggtgtgctcggcttagagacgccggtcgagcgtctgcagcacatgaaccagccggcctacgagttctacctcaaccgcaatccgggtatcgatctggccgccgatcgcctcgagatcggcgtgtgtgctcagcacaacaacggcgggattgacgtcgatctgtggtggcgatcctccatcgccggcctgtttccggtgggagaggctgccggagcccat

SEQ ID NO: 30 - protein, 128 aa, Homo sapiens
  VARIANT (40): wherein Xaa may be any one of Asp or Asn or His or Tyr
VDIDKVHDGSSLIDILTYRETVMRGRRVFLDFRINQPAGXPNLLDDEARGYLESAGVLGLETPVERLQHMNQPAYEFYLNRNPGIDLAADRLEIGVCAQHNNGGIDVDLWWRSSIAGLFPVGEAAGAH

SEQ ID NO: 31 - DNA, 269 bp, Homo sapiens
  misc_feature (1): wherein any n is one of a or t or g or c
ngcgactgcgtcgccgacagtccgacgagacgcccggtcccggaggttgaccccgaggtgcgtacgacgagggcgacctcgtctggcagccacaccgtgcggtcctcgacatcttggaacaccgccggaggcaactcgttgccaccggccggcacgagcaccgaccgggccccgtcgaacacttcggtcagacgcccagccagccagtcgacgtcttcgcgcgtgcgctcgacgcgtaccacccgcacccgcgatgtcagctcggatcc

SEQ ID NO: 32 - protein, 89 aa, Homo sapiens
  VARIANT (1): wherein Xaa may be any one of Arg or Cys or Gly or Ser
XDCVADSPTRRPVPEVDPEVRTTRATSSGSHTVRSSTSWNTAGGNSLPPAGTSTDRAPSNTSVRRPASQSTSSRVRSTRTTRTRDVSSD

SEQ ID NO: 33 - DNA, 408 bp, Homo sapiens
tgtacagtatgatacaagtatattataaatgacagcaacttttgtaaaattaggatttcagtgtgcttaaaaaggaggagctcaagagtagtggtgaaattgaaatgatttaatgagaagggtggcttggtccctgaccattaggagagacgtgtctattacagcctctctgccctgcctcccaccccttatcccagggcactccagatgcacatcatccccgcctgagagaaacagctagggaatgttcctaaacactcctttttcttgcgtagctgattgcagagctcattaggcctttcgctaaatgacttgactttgacaaggagtagagatggcgttttgattggcatcagcttctcctccggaaaagggcctagtgggcgacggtcccggcgcggctgcatg

SEQ ID NO: 34 - protein, 72 aa, Homo sapiens
MQPRRDRRPLGPFPEEKLMPIKTPSLLLVKVKSFSERPNELCNQLRKKKECLGTFPSCFSQAGMMCIWSALG

SEQ ID NO: 35 - DNA, 360 bp, Homo sapiens
gcgcgccagcttcccgcgcccgaaagcgattgaaatcctcgccgactcgatccgcctgtgttcggtggccaagccgcctgctgcgagctaagtaacggtatgactgagctgtcgcaggtgtcggtgacggcactcaagggtgtcggggaggccatggccgagaaattggccaaggtcggcctggaaaatctccaggacgtgttgttccacctgcccctgcgttaccaggaccgcacccgcgtggtgcccatcggccagttgcgcccggggcaggacgcggtggttgaaggcaccgtcagcggcgccgatgtggtgatgggcaagcgccgcagcttggtggtgcgcctgcaagacggcacc

SEQ ID NO: 36 - protein, 87 aa, Homo sapiens
MTELSQVSVTALKGVGEAMAEKLAKVGLENLQDVLFHLPLRYQDRTRVVPIGQLRPGQDAVVEGTVSGADVVMGKRRSLVVRLQDGT

SEQ ID NO: 37 - DNA, 228 bp, Homo sapiens
  misc_feature (1): wherein any n is one of a or t or g or c
ngatacgccagctgtacgagtcggatcactatacgccgccgttgtgattcggctaccactcacctttcgccgcctgaggaagtgtggctcttcgacgcgtctgaagcccttaatttgtgcgcgtacaccctgggtgagcgtctcggacctgatgacgaggtcgtcatttcggtgatggagcaccactccaacttggttccgtggcagatcgtttgtcagcgcaccggt

SEQ ID NO: 38 - protein, 76 aa, Homo sapiens
  VARIANT (1): wherein Xaa may be any one of Arg or Gly
XYASCTSRITIRRRCDSATTHLSPPEEVWLFDASEALNLCAYTLGERLGPDDEVVISVMEHHSNLVPWQIVCQRTG

SEQ ID NO: 39 - DNA, 355 bp, Homo sapiens
accggtaacgagctggaagccatgttgcgcgcagcacccgacgaacagcagatcctgtttcgggtcggggtcgcggatgtggtgccaaaatccatcgtttatcggctgatcgcgccgaccatggagttgagcgagccgatgcgcatcacctgccgcgaagacaaactcgaacggttattggccgacctggcgatccagcgcctggacctggtgatctccgacagccctatgcccacgcatctggacatcaaaggctacagtcagaaactcggggagtgcggcatcagctttttcgccacccaggcattggcggaccaatacggcggcgatttcccacactgcctgcagggcgcgc

SEQ ID NO: 40 - protein, 118 aa, Homo sapiens
TGNELEAMLRAAPDEQQILFRVGVADVVPKSIVYRLIAPTMELSEPMRITCREDKLERLLADLAIQRLDLVISDSPMPTHLDIKGYSQKLGECGISFFATQALADQYGGDFPHCLQGA

SEQ ID NO: 41 - DNA, 404 bp, Homo sapiens
  misc_feature (1): wherein any n is one of a or t or g or c
ngcgcgccggcaatcgcgctcgactggggcatgaagccgctggcggcggcaaagcatgcgttgaccgacgaatggggcaaggatgcgctgctgatcgggtccggtgcatcgattccgattgttgcggatttcaagaagacgcttggactcgacacggtgctgatcgggttcggcctcgaggatgacaacatccactcgccgaacgagaagtacaacctgaagagcttccacaagggtatccgctcgtgggcgcgcattcttgcggcgtttgccgacaccccgcgctgaggcggtcgatgctgaagcatccgccaaacgcaaaaacgccgcccggaattgggcggcgtttttagtctctgtcagtgtagaggctgacggatggaatctatatccgaagccgatcg

SEQ ID NO: 42 - protein, 95 aa, Homo sapiens
  VARIANT (1): wherein Xaa may be any one of Arg or Cys or Gly or Ser
XAPAIALDWGMKPLAAAKHALTDEWGKDALLIGSGASIPIVADFKKTLGLDTVLIGFGLEDDNIHSPNEKYNLKSFHKGIRSWARILAAFADTPR

SEQ ID NO: 43 - DNA, 396 bp, Homo sapiens
accggtaaaaccgtggcctacagcctggcggcgatccccaccgccaaggccgccggcaagcgcctggtgattgccaccgctaccgtcgccctgcaggagcagattgtctacaaagacctgcccgacctgatgcgtaacagcggcctgaactttacgttcgccctggccaagggccgtgggcgctatatgtgcctgtccaagctcgacgtgctgttgcaggaaggccacgcgcaaaccgctactgcctcgctgttcgaagaggaaggcttcaagatcgaagtcgatgaggtcagtcagaagctgtttaccagcatgatcgagaaactcgccggcaataaatgggacggcgaccgcgacagctggcccaatgccctggaagacgccgactgggcgcgc

SEQ ID NO: 44 - protein, 132 aa, Homo sapiens
TGKTVAYSLAAIPTAKAAGKRLVIATATVALQEQIVYKDLPDLMRNSGLNFTFALAKGRGRYMCLSKLDVLLQEGHAQTATASLFEEEGFKIEVDEVSQKLFTSMIEKLAGNKWDGDRDSWPNALEDADWAR

SEQ ID NO: 45 - DNA, 365 bp, Homo sapiens
  misc_feature (1)..(2): wherein any n is one of a or t or g or c
nnaccggtgtccaccgcgattgaggctcattgttccacaggctggtttgatggactcatggacgtcctcattctcggcggtacgacgaaggcccggcagttagccacccgattgttcgatgagggggtagacctgtgcagctcgttagcggggcgtacgaagtccccccggccagttcctggcccgactcgggtgggtggtttcggcggcgtcgacggtctcaaagaattcctgactgataacgaggtcaaagtcatggtggatgcctcccaccccttcgccgcagctatgcacggccacgccgctcaagcatgccgcgacctcaaccttccgctggcacggctggcaccaccaagctggcgcgc

SEQ ID NO: 46 - protein, 121 aa, Homo sapiens
  VARIANT (1): wherein Xaa may be any one of Ala or Arg or Glu or Gln or Gly or Ile or Leu or Lys or Pro or Ser or Thr or Val
XPVSTAIEAHCSTGWFDGLMDVLILGGTTKARQLATRLFDEGVDLCSSLAGRTKSPRPVPGPTRVGGFGGVDGLKEFLTDNEVKVMVDASHPFAAAMHGHAAQACRDLNLPLARLAPPSWR

SEQ ID NO: 47 - DNA, 423 bp, Homo sapiens
cgcgccgagaaactactcgcgggagttgagggagaaagggccgtcgataaggtagccgccatccgcttccccgatccggccccatgcggtaaaaccccgctcacagcacgcaacctcaccaaaacttacggctcgttggaggtgtttgccggggtagacctcaatatcgaccgtggatcccaggtggtcgtcctcgggcttaatggtgctggcaaaacgactctgctgcggatcctggcgggtaaggagaccccagacaccggagaggtgatcgccgggcacgggctcaaactcgggtactttgcccaggagcacgatctactcgacatggaccgcaccgtgctggagaacatggccagctctgcgaccgacctcaatgagaccgagatgcgcaaaatactcggttccttcctgttcaccggt

SEQ ID NO: 48 - protein, 141 aa, Homo sapiens
RAEKLLAGVEGERAVDKVAAIRFPDPAPCGKTPLTARNLTKTYGSLEVFAGVDLNIDRGSQVVVLGLNGAGKTTLLRILAGKETPDTGEVIAGHGLKLGYFAQEHDLLDMDRTVLENMASSATDLNETEMRKILGSFLFTG

SEQ ID NO: 49 - DNA, 421 bp, Homo sapiens
gcgcgcccatcgtctcgacgggggccggagccccagcggggcgcgacgcggcccgacgacgtcgaggagcgggaattccagcagtggaattcccgccagatttcagtgtggtgttgtcagtctcgtcgagcactgtgctctccttggcctttcggcacggtcagtgcccacccgggtcacggccctgcaggagttctcccacggacgtatgcacacgcctcgcgctgtactgacggcgtcgttccccggcatggggcaaaagcttgcggtgagccctcgagtcccccgcggtcgcctctcggcgtcgcggtatgaaccgtcgagtggggtggcaccccgttcacctatgctccagtatgtcacgtcccctgccgcgatgccagatttcagacactcgctggctgctcaccacactgtcacg

SEQ ID NO: 50 - protein, 71 aa, Homo sapiens
MHTPRAVLTASFPGMGQKLAVSPRVPRGRLSASRYEPSSGVAPRSPMLQYVTSPAAMPDFRHSLAAHHTVT

SEQ ID NO: 51 - DNA, 318 bp, Homo sapiens
ggtccggctgggaatcagtacgtctgtcggagtgtcgagaaggcatttggcgccgtaggcctagatgtcacccctcaggtggtgactgacattgagattgcctactggtctgccgcagctttgggggacggctccattctcgtagccgggaccggggcgatagccggtcgcttctcggaatggcgctgtgtcgatcgccgagatggagctgggtggttgttgggggatcatggttccggctactggattggcagaaaagccttgcgagctgcggcggcggaccttgaccggcgaggcccgagtaccgctatcacgcgt

SEQ ID NO: 52 - protein, 56 aa, Homo sapiens
MIPQQPPSSISAIDTAPFREATGYRPGPGYENGAVPQSCGRPVGNLNVSHHLRGDI

SEQ ID NO: 53 - DNA, 336 bp, Homo sapiens
atcatcgacgttcgcgagaagtccaaggaccttcccccgatcgttatcgctcgcgagaccttcgagacccgcgacgtcccggcatggctcgaggttcgtcccaataagggccgtattctcgttcaccagttgcctacccgtgaccagatcgtcattgacgtcaacgagcaggctatcgtcgagctctactcgaagtgatctatgcagaggggcgaccccttgcaaccccgggcgggtcaattccagttcgtgacttcctgtttggtggtggtcgcgttttggcctgagtttgctgggagaattgcgaggggtgacccccgatgcggcggcccgcgg

SEQ ID NO: 54 - protein, 65 aa, Homo sapiens
IIDVREKSKDLPPIVIARETFETRDVPAWLEVRPNKGRILVHQLPTRDQIVIDVNEQAIVELYSK

SEQ ID NO: 55 - DNA, 260 bp, Homo sapiens
  misc_feature (260): wherein any n is one of a or t or g or c
ggatccacaattcgttccagcccttaattaattttaattacaaaatgaacataaatagagtttccagctcgctcgcacagtcacgctccgttccgttcactgtgcaaccaaacaaaaaacagagatggaacgactctgttctacttggttcaggttcgttcactaaaccctctaatgggtctagtctcgcgctaggatcacatgagtgaccatacaaaaatcacgcaatgaactctacaagccagtatgtcactggaatn

SEQ ID NO: 56 - protein, 54 aa, Homo sapiens
MNINRVSSSLAQSRSVPFTVQPNKKQRWNDSVLLGSGSFTKPSNGSSLALGSHE

SEQ ID NO: 57 - DNA, 436 bp, Homo sapiens
acgcgtagagatcgatattgctctgttgcagccccgtgtagaggacgctgggttcgctgatgtccttgagctcggttgagtacccgttcttctcgagctgaactttagtgaagtgagtcatgcacacgccgtcggtccaggaggagatgaacccgagggtgatcttcttccccttcgagcccttgcaggcggcgagggctcctcctactgcgagggaggcgagagccgcattgaatgcgcgccgggaggtctgcatgatagtcctttcgtgtgtacgtgtgtctcggtcactgattcccatgagccggcctcgcgccgcccttcttgaggagggcgcgcttcttcttgaggagggcgcgggagtggcgccacttacgatatctccgcctgatctcgtcgattagggagggcagggaccccttctccctcggcgcgc

SEQ ID NO: 58 - protein, 100 aa, Homo sapiens
MGISDRDTRTHERTIMQTSRRAFNAALASLAVGGALAACKGSKGKKITLGFISSWTDGVCMTHFTKVQLEKNGYSTELKDISEPSVLYTGLQQSNIDLYA

SEQ ID NO: 59 - DNA, 414 bp, Homo sapiens
gcgcgcccgtcgcgcacgacctgctgcatctgcggcgcaaccggttcctctggaaggacacctgcttcgaccgcctgctggtgcgcaatttcgacgtgcgcgcccatgaggtgacgatcaccatcgtcttcgatgcggactatgccgatctgttcgaggcgcgcggcaccaagcgcaagcgacacggcatccgcaacgccgatgaggtgcgggccgatcaggtgacgctgtcctataccgggctcgacgatcgcacgcgcaccacgcgggtgcggttctcgccgcagccgacggagctgtccgcgaaatcggcgaccttccggctgaagctcgcgcccggcgagcggaggctgctctacaccgagatcgcctgcaatccccagggggcgccggcacatgcggccgacgacgcgt

SEQ ID NO: 60 - protein, 132 aa, Homo sapiens
MCRRPLGIAGDLGVEQPPLAGRELQPEGRRFRGQLRRLRREPHPRGARAIVEPGIGQRHLIGPHLIGVADAVSLALGAARLEQIGIVRIEDDGDRHLMGAHVEIAHQQAVEAGVLPEEPVAPQMQQVVRDGR

SEQ ID NO: 61 - DNA, 455 bp, Homo sapiens
  misc_feature (1): wherein any n is one of a or t or g or c
ngcgcgccgcctcgctgatgacagcgccgatgcttccggattgcgtgcaatagtcggtcaagccgtcgccggtgagccgcgagagaagggcggcatcctcgccgctcttcgcaggtcgcccctcgtcggcgcggatctcgactttgctcgccctcgtgaagaggggcgcaaggtcaatctgtgacgcgctaccttctcgacaccaacatcatcagcaacgtagtcaagctgcgaccctcagagtcattgttggcctggtgggcagagcagcaagacgagaatctgttcatctcctcgctgacggtggccgaaatccgccgaggtattctggagaaaccgcgcggtaagaagcgagaagccctcgacgcctggtttgcggggccggagggaccacaatcgctgttcgcgggccgtatcctgccgttcgaagagaaagccgggctgatctgggcgcc

SEQ ID NO: 62 - protein, 98 aa, Homo sapiens
RGAQGQSVTRYLLDTNIISNVVKLRPSESLLAWWAEQQDENLFISSLTVAEIRRGILEKPRGKKREALDAWFAGPEGPQSLFAGRILPFEEKAGLIWA

SEQ ID NO: 63 - DNA, 445 bp, Homo sapiens
cgcgcctggattccgtggccccatgtgattgccgaggacctgaccctgggcaaccccgattggtcgaaaaccccgcagatggtcaccctcaagcgcgtggaattgcgcatctcgcccctggcgttgctggcccagcgtgtggtgatcccgcgtattgacctcaccgaaccgagtgcgcaattgcagcgcctggccgatggccgcgccaactggaccttcaagttcgaccccaaggacccgaatgccgaaccctccaactgggtggtggacatcggcgccatcggcttcgacaaaggccacgtgaccctcgacgaccaaaccctcaagacctaactcgacgtagtgattgatttgctcggcaagccaattcccttcggcgaaatagtcggggacgccgacgccaagaaggccctggaaaaaggctcggcgccgcaggattacgcgt

SEQ ID NO: 64 - protein, 110 aa, Homo sapiens
RAWIPWPHVIAEDLTLGNPDWSKTPQMVTLKRVELRISPLALLAQRVVIPRIDLTEPSAQLQRLADGRANWTFKFDPKDPNAEPSNWVVDIGAIGFDKGHVTLDDQTLKT

SEQ ID NO: 65 - DNA, 435 bp, Homo sapiens
gcgcgcctggagcgcttcctgcagctgtgcgcgctggagaacatgctggtggtggtgccgtcgaccccggcccaggccttccacatgctgcgtcgccagctgcacatgaccacccgcaagccgctggtggtgatgtcgccgaagtcgctgctgcgccacaagctggccgtgtcgaccctggacgagctggccaacggcgagttccagcacctgatcggcgacgccaacgcagacgccaagaaggtcaagcgcgtggtgctgtgctcgggcaaggtctattacgacctgctggaggaccagatcaagcgtggccaggacgacgtggcgatcatccgcgtggagcagctgtatccgttcccgcgtgcgctgctggcggccgaactgaagaagtacggcaaggccaccgacgtggtgtggacgcaggaagaaccgcgg

SEQ ID NO: 66 - protein, 145 aa, Homo sapiens
ARLERFLQLCALENMLVVVPSTPAQAFHMLRRQLHMTTRKPLVVMSPKSLLRHKLAVSTLDELANGEFQHLIGDANADAKKVKRVVLCSGKVYYDLLEDQIKRGQDDVAIIRVEQLYPFPRALLAAELKKYGKATDVVWTQEEPR

SEQ ID NO: 67 - DNA, 282 bp, Homo sapiens
gcggtgctcgtcattggtggctactcggcctacgaaggtatctacaccatgatgactgagcgggaccggtacccggctttccgtattccgacggtgtgcatcccggcttctatcgacaacaacctccccggttcggaactgtccatcggcaccgacaccgctctcaacgtcatcgtcgaggcgagggacaagataaaggagtcgggtatcgcgtccagacgctgcttcgtcgtcgagacgatgggtcgtgactgcggatacctcgcgttgatatcgggtatc

SEQ ID NO: 68 - protein, 94 aa, Homo sapiens
AVLVIGGYSAYEGIYTMMTERDRYPAFRIPTVCIPASIDNNLPGSELSIGTDTALNVIVEARDKIKESGIASRRCFVVETMGRDCGYLALISGI

SEQ ID NO: 69 - DNA, 435 bp, Homo sapiens
  misc_feature (391)..(431): wherein any n is one of a or t or g or c
gctagcagtgccgtactcatacttggctcctctcggcatgatatggaccttatctgtcgtagtgatctggtgacttcgcaggaacgcgaacagatccgtagaaatgcggtgggacacctttgtgggcgattcatcgatgctgatggacgagtggtggccccgaccttgggtcaacgcacctcgagccccaccctggctcagctgcgtcggagtcgacgcaccgtgctcatcactcacggggcacatcaagtcgagtttgtccgcgctgcgacattaagaggttatgtggaccacatcgtcacggacgtgtctaccgctgagctgcttctcaagtacgcctgacgacggccccgcgtcatgtcgtggcctcgcattggcacgaatgtgccanccggaaggatacggcggccctacagtgatcgctctgagcnagga

SEQ ID NO: 70 - protein, 113 aa, Homo sapiens
ASSAVLILGSSRHDMDLICRSDLVTSQEREQIRRNAVGHLCGRFIDADGRVVAPTLGQRTSSPTLAQLRRSRRTVLITHGAHQVEFVRAATLRGYVDHIVTDVSTAELLLKYA

SEQ ID NO: 71 - DNA, 172 bp, Homo sapiens
tccggacgcagcctgcccggatgggtgacagggctggcattcgtgtcggcgaacctcggcgccgtcgagatcatgggaatgtcggctaacggagcccagatcggcatcccgacggtccattacttgtggatcggcgctatacccgcgatggtcttcctcggcatcctcatga

SEQ ID NO: 72 - protein, 57 aa, Homo sapiens
SGRSLPGWVTGLAFVSANLGAVEIMGMSANGAQIGIPTVHYLWIGAIPAMVFLGILM

SEQ ID NO: 73 - DNA, 179 bp, Homo sapiens
actagtccgttcttatgacactactaaaaataaacacaagaagagttgcttttcctgatttcacctatgactcagattctgattactgtagtctgtactcatgtccttccctgagactggtagaatgcgccggcacccccaaacactcaagattctggagtgtaaataatggaggatcc

SEQ ID NO: 74 - protein, 55 aa, Homo sapiens
MTLLKINTRRVAFPDFTYDSDSDYCSLYSCPSLRLVECAGTPKHSRFWSVNNGGS

SEQ ID NO: 75 - DNA, 427 bp, Homo sapiens
  misc_feature (1)..(420): wherein any n is one of a or t or g or c
nngtcgactatgaccagtgggatgtctcttcagacaggacaggtgaggccctcagacggcacatcggaggccgtcggatacatactggccatcgtcttcagtgtcctgttcatgatgtcggcgatctattacggcgtgatgatcgccgactcagtagtcgaggaagagcagtccaggatcgtggagatcctgttgacgggggtgcgtgcccgtcagttgctcatcggcaagatcgtaggcaacacggtattggcggtcggacagctcatcatcatttgcgggttgagcatgctcgccgtgtccttctcgncatgatcgaacatcatcacgttcgcgatgtcgtggtcggtgatgtggttcctgctgtncttcctcgtcgggttcgtggcgctggccagcgtgtacgcggctgcggggtcnatggctc

SEQ ID NO: 76 - protein, 104 aa, Homo sapiens
  VARIANT (1): wherein Xaa may be any one of Leu or Ser or Trp or Pro or Gln or Arg or Met or Thr or Lys or Val or Ala or Glu or Gly
  VARIANT (104): wherein Xaa may be any one of Ala or Pro or Ser or Thr
XSTMTSGMSLQTGQVRPSDGTSEAVGYILAIVFSVLFMMSAIYYGVMIADSVVEEEQSRIVEILLTGVRARQLLIGKIVGNTVLAVGQLIIICGLSMLAVSFSX

SEQ ID NO: 77 - DNA, 378 bp, Homo sapiens
ccgctgctgggccggcgcgtgcccgtgctggaaaaccacgagctggcgcgccagcccctgcaacaccagttggaagactgcggcctggaagtcacgccattcaacagcgttgaaagcctgaccaatggcatcaccagcgcccaccagaccgaacaggccattgacctggcggtgctgggcatcaccgccaacgacatcccgccggagcgtttgaaccaacacctgtgggacctcgaacacctgggctgcaaggtactggtgctgtgcccgaccaccgaacagctgctattcaaccagtcggtgccgaaccccaacagccagttgcaggccaaacccgcctgcacccgcaaactgagccgtgccctggccgacctgatc

SEQ ID NO: 78 - protein, 126 aa, Homo sapiens
PLLGRRVPVLENHELARQPLQHQLEDCGLEVTPFNSVESLTNGITSAHQTEQAIDLAVLGITANDIPPERLNQHLWDLEHLGCKVLVLCPTTEQLLFNQSVPNPNSQLQAKPACTRKLSRALADLI

SEQ ID NO: 79 - DNA, 368 bp, Homo sapiens
gtcgacgatttcaagggggttaccgcctccctgacgaacccgggtggctttggcaccaatcactccatcgctcgcctcatgcctggccagggcatgatcctcggggttggatcgattgactatcccgccgcctaccagggcaactctcccactcgaatagcggagttgggtatctccaaggtgacgacgctcacctctacctacgaccatcgcatcatccagggcgctcagtccggagaattcctgcgacgcatgcatcagttgttgctgggagctgaccgcttctatgaggacatcttcaagtcactgcgcatcccctacgccccggttcagtgggcaagtgaccgtcttgctaatcgcgctgatca

SEQ ID NO: 80 - protein, 122 aa, Homo sapiens
VDDFKGVTASLTNPGGFGTNHSIARLMPGQGMILGVGSIDYPAAYQGNSPTRIAELGISKVTTLTSTYDHRIIQGAQSGEFLRRMHQLLLGADRFYEDIFKSLRIPYAPVQWASDRLANRAD

SEQ ID NO: 81 - DNA, 396 bp, Homo sapiens
  misc_feature (367)..(396): wherein any n is one of a or t or g or c
gtcgaccaagtcaccggtatctgccgggcagtccaggaactttgccgcgaggagagcggtgacatcctggtattcctagctggtgagcaggagatccatgagaccgccgaggccctggcggacctcaatctgtctaacaccgaagtcctgccactctttgcccgcctgtcggccgcagaacagcatcgggttttcaccccgcatgctggacgacggatcgtgctggccaccaacgtcgccgagacctccctgaccgtgcctggaatccgctacgtcattgatccgggaactgcccgtatctcgcggtactcggtgcgcaccaaggtccagcgcctgcctatcgagccggtctctcagggcagtgccnaccagcggggcggacgatntgggcgcgtn

SEQ ID NO: 82 - protein, 132 aa, Homo sapiens
  VARIANT (123): wherein Xaa may be any one of Asn or Asp or His or Tyr
  VARIANT (129): wherein Xaa may be any one of Lys or Phe or Ser or Tyr
VDQVTGICRAVQELCREESGDILVFLAGEQEIHETAEALADLNLSNTEVLPLFARLSAAEQHRVFTPHAGRRIVLATNVAETSLTVPGIRYVIDPGTARISRYSVRTKVQRLPIEPVSQGSAXQRGGRXGRV

SEQ ID NO: 83 - DNA, 370 bp, Homo sapiens
  misc_feature (1): wherein any n is one of a or t or g or c
nggatccaggccagaggcatggtcgtcgagcaacagcatccgcgctacgggacgctgcgcctgcccaacctgccgttccggttttccgattgcgacacgacgattcgcgaagtcgcgcccgaacttcgggcagcacaacgcggaagtcgcgcgcgccctcgggttcgattcggccgagatcgacgcgatgcaggccgacggcgtcctctattcaaaagcgagccaatgatgaccgaccaatacgcggtgatcggcaatccgatcggacacacgaaatccccgctgattcacggtctgttcgcgaaggaaacgcggcaggacatcagctatacggcgatcgaggggcccgtcgcgccggcaggcgcgttcg

SEQ ID NO: 84 - protein, 123 aa, Homo sapiens
  VARIANT (1): wherein Xaa may be any one of Arg or Gly or Trp
XIQARGMVVEQQHPRYGTLRLPNLPFRFSDCDTTIREVAPELRAAQRGSRARPRVRFGRDRRDAGRRRPLFKSEPMMTDQYAVIGNPIGHTKSPLIHGLFAKETRQDISYTAIEGPVAPAGAF

SEQ ID NO: 85 - DNA, 313 bp, Homo sapiens
  misc_feature (1)..(3): wherein any n is one of a or t or g or c
nnnttctgggcgcatcgatgcgttgagtaagacggagaaaatcctcgccaggggccccgaccaggagagttatggatgcttcctcctgacgacctggaccgggagctggctcagtcgctcgctgtcgatggacgtaccagcgccacctcacttgcccgtaccctcgacgtccccgccagcaccctgcatcgtcggctgcagaagttgctaaccaatcggcagatcgaattgcggtgtgacgtcgcggagctgggcgggtggagtttggagtgcacgtggaccgccaccatccctcttaaccacaagactcgag

SEQ ID NO: 86 - protein, 79 aa, Homo sapiens
MLPPDDLDRELAQSLAVDGRTSATSLARTLDVPASTLHRRLQKLLTNRQIELRCDVAELGGWSLECTWTATIPLNHKTR

SEQ ID NO: 87 - DNA, 322 bp, Homo sapiens
gtcgacgagctgtctaactggtacgtgcgccggtcccgccgtcgcttgtgggacggcgatgagggtgccctgtggacgttgcacgagaccctcgaaaccctcactaagttgatggcaccgatggttccgtttatcaccgagcgggtctggcaggacctcttcgtgacgacaaatccgcacggcccggagtcggtccatttggcaagttggccggtggccgacgactcgctcatcgacgagtccctgtccgaatcgatggatctggcccgacgcatcgtcgagctggggcgcggtgcccgtgtagaggccaaggccaagatct

SEQ ID NO: 88 - protein, 107 aa, Homo sapiens
VDELSNWYVRRSRRRLWDGDEGALWTLHETLETLTKLMAPMVPFITERVWQDLFVTTNPHGPESVHLASWPVADDSLIDESLSESMDLARRIVELGRGARVEAKAKI

SEQ ID NO: 89 - DNA, 395 bp, Homo sapiens
  misc_feature (49)..(374): wherein any n is one of a or t or g or c
gtgcacagctgcgacgaggtgatcgaggatgggcagcatcatccgtcgngcatggggagtgcccagctcttcgcgcgccaattcgacgattgcctgtgccactcgcacctcggtgtgagtggcgtncgttagcagtgatgcgatggcggtcgtgcgataggcaccctctgcgacatatcgctgggccgatgaggcatcgacgatctccccgcggtgtcgtccataggcgataccgcgagcattgacgaccatntcgggtcccgaaccgttgacgccgagaagaacattgtngnttgtaatcttcttgacgatgacgtgcccttgtctgagcgatccctgcttcgtcgttgcgtgccgtgagcgatcgggacgtngcacgggggtcatctgcggtg

SEQ ID NO: 90 - protein, 129 aa, Homo sapiens
  VARIANT (5): wherein Xaa may be any one of Arg or Gln or Leu or Pro
  VARIANT (32): wherein Xaa may be any one of Asn or Ile or Ser or Thr
  VARIANT (33): wherein Xaa may be any one of Asn or Asp or His or Tyr
  VARIANT (45): wherein Xaa may be any one of Asp or Glu
  VARIANT (88): wherein Xaa may be any one of Asn or Asp or His or Tyr
MTPVXRPDRSRHATTKQGSLRQGHVIVKKITXXNVLLGVNGSGPXMVVNARGIAYGRHRGEIVDASSAQRYVAEGAYRTTAIASLLTXATHTEVRVAQAIVELAREELGTPHARRMMLPILDHLVAAVH

SEQ ID NO: 91 - DNA, 331 bp, Homo sapiens
gtgcacggtcattcggctgatcgcgaagcgacgcacgaggtcgtcggcctgcgcgctgccgtgatcgaccacgaagtcgaggatcgcccggcgtcgcgtcctcacggcggaggtctcggtgttgcgtgtcatgccgtctcgaacccctcccgggtacggtgcatcggccagacgtaacaacccgaccgatacaaacgatacatagtcctccatgtcgtgccggtaaagtgggacaggagcgataaagccgatcactttattgtcaaacgcgacggttcataaccgtgggttatcgaccacccccgataaaagactggacggtttatttttc

SEQ ID NO: 92 - protein, 71 aa, Homo sapiens
MEDYVSFVSVGLLRLADAPYPGGVRDGMTRNTETSAVRTRRRAILDFVVDHGSAQADDLVRRFAISRMTVH

SEQ ID NO: 93 - DNA, 341 bp, Homo sapiens
gtcgacgaattcgacctggcctgaggcgtaatccgcgacggccatgagacgcccagtgggatcgacggcaccgtggcaaggccattggccttcgagctgaacggtcccgacgacctggaactcgcgtccggggtggacaacgacaagggtgccatcacgctcacacagcacgacgacgaggtggtatagcggggtgacccaggacgcatcgcctaaggggcaactacccacaacgttggtgtgaggcccgtcaggtcctgtcgtcacctgccacgcggtcatgcctccgattgcggcatcgcaagtgcggtaacaggcaagaactggggtgacggccatgg

SEQ ID NO: 94 - protein, 113 aa, Homo sapiens
MAVTPVLACYRTCDAAIGGMTAWQVTTGPDGPHTNVVGSCPLGDASWVTPLYHLVVVLCERDGTLVVVHPGREFQVVGTVQLEGQWPCHGAVDPTGRLMAVADYASGQVEFVD

SEQ ID NO: 95 - DNA, 490 bp, Homo sapiens
  misc_feature (490): wherein any n is one of a or t or g or c
gcgccgatccccgactggtttagctatgacagcgttgtcaagacgttgcgcgagagctacccgcccaagacaagccaaggtttcaccatcctgctctcgggcttgctgaactccggcaaggaccagattgccagtgcattacaggtcaaacttcatgaacagggtggccgcagcgtctcactcctgcttggtgacacggtgcgtcacgagctctcctctgagctcggcttctcgcctgaggaccgccacaagaacctccagcgaattgctttcgtcgctagcgaactcacacgtgctggtgctgcagtcattgcttcacctattgcgccatacgagcactcgcgtcaaatggcccgcgacacgattcttaagggcggtggctcgaacaactttttcctgatccacgttgcaacgcccctggagtactgtgagaagcatgaccgccgcggcaactatgccaaggcccgccgtggtgaagtcaaggcttccn

SEQ ID NO: 96 - protein, 163 aa, Homo sapiens
APIPDWFSYDSVVKTLRESYPPKTSQGFTILLSGLLNSGKDQIASALQVKLHEQGGRSVSLLLGDTVRHELSSELGFSPEDRHKNLQRIAFVASELTRAGAAVIASPIAPYEHSRQMARDTILKGGGSNNFFLIHVATPLEYCEKHDRRGNYAKARRGEVKAS

SEQ ID NO: 97 - DNA, 423 bp, Homo sapiens
  misc_feature (1)..(217): wherein any n is one of a or t or g or c
nngaggcagctggagcatgccccgtccctcctcctcggtccactgttcctaagtcgaattctgccatttgcatccctgtgtttccttttttctctttcagccacaacggccctcctgggtgcttcccnncagggcattcatccctcaccatgttgagcacnttgcccagcccgtttccagcttccggcctcagcctgtgtggtcttcccctccccgngatgcccttccctctgccctcagcctttcagaaacctgcccagcctccaggggcccactcctccaggcagccctcctggctgctctgagtcctgggaaccccagtcccaaccacagtgcacgtcacactagagaatactgtctgcccatcttgacggtcaggacgtgagggaagcaattattctgaaaacctctctttttggatcc

SEQ ID NO: 98 - protein, 63 aa, Homo sapiens
  VARIANT (2): wherein Xaa may be any one of Arg or His or Leu or Pro
  VARIANT (21): wherein Xaa may be any one of Arg or Gly
AXCPARFQLPASACVVFPSPXCPSLCPQPFRNLPSLQGPTPPGSPPGCSESWEPQSQPQCTSH

SEQ ID NO: 99 - DNA, 502 bp, Homo sapiens
cgcgtgggaggtgaaatcaatgctttcacaagtaaacaagaaacggtgtactctgccacagtgctgcgcaaggacttctcacgcgcagtggatgtgctcactgatattgttttccacagcacctatccgcaagcagaaatcgacaaggaagtggaagtaatcatcgatgaaatcgatagttatcgcgacagtcccgctgaattgatcttcgatgaatttgaacaattagtctatggtgacgctcctttaggtcgcgacattttgggaaatcccgaacgcctgcgcacctacaccacagccgatgcggtgcgatttgccaaagagcattatgttccgcaaaatgccgtgttttacgtgcatggagaagtggagatgcgcaccgtgattcgtcaacttgaaaaatggaacaactgcaaaatggtcggttccatcgaagatagttcttcaaaaaatgccgatttcaccgaagtttcttgcgacactcaacaagagaaatgcgaga

SEQ ID NO: 100 - protein, 167 aa, Homo sapiens
RVGGEINAFTSKQETVYSATVLRKDFSRAVDVLTDIVFHSTYPQAEIDKEVEVIIDEIDSYRDSPAELIFDEFEQLVYGDAPLGRDILGNPERLRTYTTADAVRFAKEHYVPQNAVFYVHGEVEMRTVIRQLEKWNNCKMVGSIEDSSSKNADFTEVSCDTQQEKCE

SEQ ID NO: 101 - DNA, 459 bp, Homo sapiens
  misc_feature (1)..(2): wherein any n is one of a or t or g or c
nnacgcgtggaccaacgctacgttgtggagaagcacgtgggttggggctttgcggcgcacctcgagccaggcgcatggtatgtcatggctgaccaagagggcgacgagagcttccacgatgactggtgggaatcgctagcgattgatcaagacatagagtcgcagctgaatgctgtcgagcagcaggcagaggtgcttccgtccagcagcactatgtcgttgggcacgcatatgccggagctgcgggcgacgtatgaggagcagcaacataccatcaaccagctcagacagcaggcgcagcagcagcagggagagatctccgtcgtgcgctctaatctaactagagcgcagcagcagaaccgaacgctgcagcaacaccagcagcaaatggagcaagactaccggcaccgcatcgaaacgttgcaacaggagcatgggcgtcagatggagcgcttagag

SEQ ID NO: 102 - protein, 153 aa, Homo sapiens
  VARIANT (1): wherein Xaa may be any one of Ala or Arg or Glu or Gln or Gly or Ile or Leu or Lys or Pro or Ser or Thr or Val
XRVDQRYVVEKHVGWGFAAHLEPGAWYVMADQEGDESFHDDWWESLAIDQDIESQLNAVEQQAEVLPSSSTMSLGTHMPELRATYEEQQHTINQLRQQAQQQQGEISVVRSNLTRAQQQNRTLQQHQQQMEQDYRHRIETLQQEHGRQMERLE

SEQ ID NO: 103 - DNA, 425 bp, Homo sapiens
tcatgaactttactgtgatcgagtcttgatgcagtcacctataaaaccgataagaggcgatgcgatgagcaattcaaccaaagcccgtaaacccgacagtaccgtggacgcctgggccattctgttcctgataatcctggtggtgggaaccgcggtgttctgggttagccaccaataaaactggctgattgagcctcgattgactgtcgcaatgccactatcatggcggtcaatactcaaggcttgaacaccatgttgaaggttctgattacgtgtatgtggttgctgggggcggcgtacggagcgatggctcacgcgacgtccgtggtgtttctcaaccctggcatgtcgacggaaaccttctgggtcagttacgcgcaattcatgcaggccgccgccaagacctcggcctgaattgcgcgtgc

SEQ ID NO: 104 - protein, 63 aa, Homo sapiens
MAVNTQGLNTMLKVLITCMWLLGAAYGAMAHATSVVFLNPGMSTETFWVSYAQFMQAAAKTSA

SEQ ID NO: 105 - DNA, 328 bp, Homo sapiens
  misc_feature (1)..(80): wherein any n is one of a or t or g or c
nntatgccggcggcgactgcacgaagggcgccgacctcaccgtggtcgcggtggccgacggcaagcgcgccgcgatcgcnatcgacgccgacctcatgcagcacgggagctagagcgaccatggccgatctgcgctgcaacgtcgccggaatccgctcgccgaacccgttctggctggcctccgccccacccaccgacaaggaatacaatgtccgccgcgcactcgccgccggctggggcggggtggtgtggaagacgctcggcgaggacccgccggtggtcaacgtctcgtcgcgctacggcgcggtgagctatcacgcaaacgcgt

SEQ ID NO: 106 - protein, 109 aa, Homo sapiens
  VARIANT (1): wherein Xaa may be any one of Phe or Ser or Tyr or Cys or Leu or Pro or His or Arg or Ile or Thr or Asn or Ser or Val or Ala or Asp or Gly
  VARIANT (27): wherein Xaa may be any one of Arg or Gln or Leu or Pro
XMPAATARRAPTSPWSRWPTASAPRSXSTPTSCSTGARATMADLRCNVAGIRSPNPFWLASAPPTDKEYNVRRALAAGWGGVVWKTLGEDPPVVNVSSRYGAVSYHANA

SEQ ID NO: 107 - DNA, 372 bp, Homo sapiens
  misc_feature (372): wherein any n is one of a or t or g or c
acgcgtttgaaggctactcacctgacctggcgaggtacgccattgaagcagcacccgacttgcctgcatcggtgctgaatcaaagcgtcgatatcttctgcgatgtcgcctaccggaccaatggtggcggcggcattcacccgcgtaccgggtcggctcgtcgttgcgaaacctgcattctcgcgtctgatcacgttgctgaggccgttgatgccaggcccgctccgtcgctccgggacggcgttgccgtgttgtcgtgggtgcgaaaaagcgggtatatcagccacgatcatcgaacgcagcagaaactgttcggcccgctgccgaccattgagggttttgtgacgagttaccgccgggatcggggcttgn

SEQ ID NO: 108 - protein, 91 aa, Homo sapiens
MIVADIPAFSHPRQHGNAVPERRSGPGINGLSNVIRRENAGFATTSRPGTRVNAAATIGPVGDIAEDIDALIQHRCRQVGCCFNGVPRQVR

SEQ ID NO: 109 - DNA, 288 bp, Homo sapiens
  misc_feature (1)..(2): wherein any n is one of a or t or g or c
nnacgcgtaccagatttcacccactcagcgctgccagctctcaaccagctgctgttgccctttttgtctttggtgactgacgctgagctgcgtcgtaatccgactgtcaaggacgagttggctacgtcagagcgtccgatgtccggtctcatgctcaccttcccggtacatcaggccgctgacatcctcttctgcaaggcgaaccttgttcccgtcgggcgtgatcagcttcctcacattgagcagacccgtgtcatcgcgcgtcgtttcgacgagcggtacgggcgc

SEQ ID NO: 110 - protein, 96 aa, Homo sapiens
  VARIANT (1): wherein Xaa may be any one of Ala or Arg or Glu or Gln or Gly or Ile or Leu or Lys or Pro or Ser or Thr or Val
XRVPDFTHSALPALNQLLLPFLSLVTDAELRRNPTVKDELATSERPMSGLMLTFPVHQAADILFCKANLVPVGRDQLPHIEQTRVIARRFDERYGR

SEQ ID NO: 111 - DNA, 269 bp, Homo sapiens
  misc_feature (1): wherein any n is one of a or t or g or c
ngatttctgggtcgaaggtcagacggaccggagtaccaatggtgtcacagcgggccacatactgatcccgcaccgttccggtctccaaccacactgttaatagctcgtcaaggtgaatgagaaggctggccagcaactcattcttgtcgtggttcaacccacacagagccagagaggtcgccgtcggcaggggcaattcgtcacgccccatcgaaacgttgatgccgattccgatgacggcgtgcggaccggctggaccgtcaacgcgt

SEQ ID NO: 112 - protein, 70 aa, Homo sapiens
MGRDELPLPTATSLALCGLNHDKNELLASLLIHLDELLTVWLETGTVRDQYVARCDTIGTPVRLTFDPEI

SEQ ID NO: 113 - DNA, 248 bp, Homo sapiens
acgcgtggctggcttccatggcgtgctggacaggaccacgggcgccctcgtgtccacggagagggacgactcgtcgtccagcggctcgagaccgagccccacgcgaatcgtgtcccatcgctcagcccacgtgtgccctcgcacttgcacgagcgaaagcagtgtattccacaggcgcgcatcgatcgatgcctgtgcctcggggtgtgtacgaagcgcggggaagtcggtgcatgatcggggggcta

SEQ ID NO: 114 - protein, 77 aa, Homo sapiens
MACWTGPRAPSCPRRGTTRRPAARDRAPRESCPIAQPTCALALARAKAVYSTGAHRSMPVPRGVYEARGSRCMIGGL

SEQ ID NO: 115 - DNA, 261 bp, Homo sapiens
gcgcgccacgtccgccagctcgccagcgagaagatcacctcgctcgaagtgccggccgactacccggtgggccgcatcgtcgcgatcgacatgatcgacaaggacaccggtgaagtcatcgccgcggccaacgacgaactcaccctcgagcaccttgagcacttccacaaggcaggcatcgagacggtgccgacgctgtacgtgaacgatctcgatcgtggtgcgtacatctcgaacaccctgcgcatcgacaacacgcgt

SEQ ID NO: 116 - protein, 87 aa, Homo sapiens
ARHVRQLASEKITSLEVPADYPVGRIVAIDMIDKDTGEVIAAANDELTLEHLEHFHKAGIETVPTLYVNDLDRGAYISNTLRIDNTR

SEQ ID NO: 117 - DNA, 299 bp, Homo sapiens
  misc_feature (299): wherein any n is one of a or t or g or c
ccgcgggatcctgtccagcaaggaatgtgaggttcttctcgacgaagtcgtcggcgatcctggcgctgtgagcgcgggccaccagaacagtttcgtcgatacaccgagcaaagacatcgcggtaggggccaaggaggtcgcctaaggagacgtcgagtactgcaccacaggctccttgggggacgacggaacacatcttgacccacaaagtggtggtgatgttctccacgtcgggagaggtgagaccgcccttgcggcaagcctctcgcaactcattgacgagggtattgggggaatcn

SEQ ID NO: 118 - protein, 65 aa, Homo sapiens
MCSVVPQGACGAVLDVSLGDLLGPYRDVFARCIDETVLVARAHSARIADDFVEKNLTFLAGQDPA

SEQ ID NO: 119 - DNA, 282 bp, Homo sapiens
gatcttgaattgataaggaaggaaaatttgggtggagaaattgttcctcggtctgttctgctgtgcaccttggagggggtttcgtatttgctttgtgctcttggggatggtaatttgttcagttttctactgaatgcaagtacaggtgaactgactgatagaaagaaggttaccctcgggacccaacccatcagccttcgtaccttctcatcaaagggtaccacccacgtgttcgcttcgtcagataggccaactgtcatctatagcagcaataagaagctt

SEQ ID NO: 120 - protein, 94 aa, Homo sapiens
DLELIRKENLGGEIVPRSVLLCTLEGVSYLLCALGDGNLFSFLLNASTGELTDRKKVTLGTQPISLRTFSSKGTTHVFASSDRPTVIYSSNKKL

SEQ ID NO: 121 - DNA, 508 bp, Homo sapiens
  misc_feature (1): wherein any n is one of a or t or g or c
nctcggtctccaacccccgcggtaacacggcgacgacagtgtccaaagcggctgcgtcgacgacggcgttcagcctggcgacagttgtctggctgtcaagcacgatgttcgcacgggcagtatcgtcgaatagttcaggggagcggggagccaccagcaccagacgacgccgttgggcagggttgaggcgactggcggggaccccattcaggacggtctcggagccgtggtctatcgccccggccaaggcgtcacagaccgattgaggcgccatgacacccacatgggtgcctccggcgacgtcaagctggaaatccccgaccgggatgtgcaactccaccgggccatcaccgggtgtggtgcgggcaccgtcgtcggggtggacctgccaggctgccgggctatcacgcaactcacagaatcggtccccggaggcgtgggcggtggccaacatcgtcgcggtgtcgaggcccagtgctcgcagcggagggccgagggtttgggccag

SEQ ID NO: 122 - protein, 151 aa, Homo sapiens
MLATAHASGDRFCELRDSPAAWQVHPDDGARTTPGDGPVELHIPVGDFQLDVAGGTHVGVMAPQSVCDALAGAIDHGSETVLNGVPASRLNPAQRRRLVLVAPRSPELFDDTARANIVLDSQTTVARLNAVVDAAALDTVVAVLPRGLETE

SEQ ID NO: 123 - DNA, 237 bp, Homo sapiens
  misc_feature (1): wherein any n is one of a or t or g or c
nactcaatcagacacatacacaaacacaaacacaaacacacttacacttttgtactgacactcagaaaccagaaacacgagcacacatacacaaaagccctgaggttgggatattctgcttcagtacctcgcaccttttccagagatctcactctcctcacgatgcaagatgtaacgtcattgtaaatatatctccccatgacagcgctgattctgctgtgacggctgcccacgcgt

SEQ ID NO: 124 - protein, 52 aa, Homo sapiens
MGRYIYNDVTSCIVRRVRSLEKVRGTEAEYPNLRAFVYVCSCFWFLSVSTKV

SEQ ID NO: 125 - DNA, 297 bp, Homo sapiens
  misc_feature (1): wherein any n is one of a or t or g or c
nacgcgtcccgcatcttcaaaggtcctctgatctggatcctgttgtgcatcggcttgatcattgtgttcttacagttcgccggatcggggaacgggtataaggacatcccgacttctgaggctgtcagcatcatcaacagctccaagaagctggatagcgtcacgctgactgacggcgaccaggtcatcaagatcactgagaacgagaacaagaagtaccgctcgtactgggttggcaaccagtccgatcagctcgttgacaggctcaacgaccgagttaaagcgaagacgctgcag

SEQ ID NO: 126 - protein, 89 aa, Homo sapiens
IWILLCIGLIIVFLQFAGSGNGYKDIPTSEAVSIINSSKKLDSVTLTDGDQVIKITENENKKYRSYWVGNQSDQLVDRLNDRVKAKTLQ

SEQ ID NO: 127 - DNA, 370 bp, Homo sapiens
  misc_feature (1)..(2): wherein any n is one of a or t or g or c
nnatgcatggagaaagtctcggtcgacatcgcggtcatggaaccggcatctcacggcggatgtggtgttcatgttgcagctattccgttggagatccagtggtacgacgtcggctcttacgaggcgctggccccccacttacctagtgatgggatgggcaacaacgtgagcggtttgacggtatcggttgactcagccggaaacttgttgatcaatgaccgtcctgacgctgtcttagccgtcgcaggcttgcatgacatggccgtcgtgagcactgatcgcgccaccctggtgatgccgatgtctcaatcgcagcaggttaaggctgtggtggccgaggttgctgcccgggtgggagcgcgatacgcgt

SEQ ID NO: 128 - protein, 123 aa, Homo sapiens
  VARIANT (1): wherein Xaa may be any one of Ala or Arg or Glu or Gln or Gly or Ile or Leu or Lys or Pro or Ser or Thr or Val
XCMEKVSVDIAVMEPASHGGCGVHVAAIPLEIQWYDVGSYEALAPHLPSDGMGNNVSGLTVSVDSAGNLLINDRPDAVLAVAGLHDMAVVSTDRATLVMPMSQSQQVKAVVAEVAARVGARYA

SEQ ID NO: 129 - DNA, 235 bp, Homo sapiens
tggccacggcgatgatggcgttgcgctgccgggtgaggccacgctcgccgatgaggaacgtcacagcctcgcccgatcggtcgcgtgtctcgccgaaatccgcttcgctcggcgcgcagacgatcacccgatcggcggcccgctgctgccgctgcagatcacgcaccgtgtgtgacaggatatccggccgcccggccgtggcaattccgacgacgatattgagcgacacacgcgt

SEQ ID NO: 130 - protein, 74 aa, Homo sapiens
MMALRCRVRPRSPMRNVTASPDRSRVSPKSASLGAQTITRSAARCCRCRSRTVCDRISGRPAVAIPTTILSDTR

SEQ ID NO: 131 - DNA, 577 bp, Homo sapiens
accggtgggccctatgttcgaccgctcgggacggcgtcgatcagcgtctccgtgatcgcgagcgtggccgggacggtcggcaatgtcgcggcgggtgcgatctcgctgctgggctcatcggtgccggggatcgatctcatcagcaatccgcaaggcttcgctaatggcgcagatgccgaaagcgatgccgcgcttcgaacgcgtttcgtcgcctatatcaacagccgtgcgcaggcgacggtgacggcgatccggaccgacgtggaggccatccagctcggcgtgagctgtgacatcatcgagaataccgccccggatggcacgctgatggccggtcacttcacggttgtcatcgacgatggcagcgggcaccccacccaggcattgctgacccaggcgcagcaggtggtcgatgccgcccggccgatcggatcggtgttcagcattgtcgggccggcggtcacgatcgccaatgtcagcatgtccatcggcgtcgaatgccaggccgtctttgccgacgtcgtctccgcgatcgagaaggcgaatacgcctacatcgattcctcgccgtggcgcgt

SEQ ID NO: 132 - protein, 83 aa, Homo sapiens
MAGHFTVVIDDGSGHPTQALLTQAQQVVDAARPIGSVFSIVGPAVTIANVSMSIGVECQAVFADVVSAIEKANTPTSIPRRGA

SEQ ID NO: 133 - DNA, 363 bp, Homo sapiens
  misc_feature (184): wherein any n is one of a or t or g or c
atggaagccgttttacacactcatcacacttggcatttttctgctagcggactgacctcctatgaacctcttctacttactattcatcatattattcaatcatgctgcaataaccttaaccctgtggctctctggacctctccatcagatgaaacaccacatggctgcttaactctgacagacncagcttttaattccttgggagcaattcctgtggacaatgctgagttgtcctggtttacagatggctcacatttaaagaatgagtctggcaagtattgtgcaggctgtgcagtcgtgacttcctttgagattgtgaaagcagctcatttactattaactacttcagcccagcaggcagat

SEQ ID NO: 134 - protein, 121 aa, Homo sapiens
  VARIANT (62): wherein Xaa may be any one of Ala or Pro or Ser or Thr
MEAVLHTHHTWHFSASGLTSYEPLLLTIHHIIQSCCNNLNPVALWTSPSDETPHGCLTLTDXAFNSLGAIPVDNAELSWFTDGSHLKNESGKYCAGCAVVTSFEIVKAAHLLLTTSAQQAD

SEQ ID NO: 135 - DNA, 189 bp, Homo sapiens
atctgattatgagatgatatgcacacgttatgtaaatgaggtgcacgtgtgagactatgagaatagtactcgttgtaaaatttgattattctcttcttctgactcctgctctgtctgaacatagcaaaggatatgcatctctcatactgtatgctagtatgagtatcaacaatccgctctttctggaag

SEQ ID NO: 136 - protein, 51 aa, Homo sapiens
MRCTCETMRIVLVVKFDYSLLLTPALSEHSKGYASLILYASMSINNPLFLE

SEQ ID NO: 137 - DNA, 381 bp, Homo sapiens
agatctatagcaatggagatatagagaagtgtactcataacagaactataaaataattcatgaaattttgcatattagcttataataaactcttgatcactattatttaggtcagaattgccaaaggtagaggatgactcgtccctcttatgaaattttacagaaaactcagtttttgttgattttagaataatgaatatatctccctcttctttctaacaaacaatggaaactttgatagaaacaccaccgaaagtgtattccagagaccaccaatttcaagaaaggatctccaaaagaggggctccaacgtcaaaagacggaagggagaatggtgcccctgatattcttttagcagattcacagtgcatggtggatctc

SEQ ID NO: 138 - protein, 52 aa, Homo sapiens
METLIETPPKVYSRDHQFQERISKRGAPTSKDGRENGAPDILLADSQCMVDL

SEQ ID NO: 139 - DNA, 412 bp, Homo sapiens
aaatttgtggcttaacaacaatagagagaaattatttcaagtgacttcttagtaatcatactgctaacaataacattcatattgtcacttggattcatatatattacaaataatatatatgattttacagatctctgtgtgtgtaggaagagagtaagtaaccacattactgttgttaagatcaagattttcagtataagaaaaaaaatgatataaagtcaaagaggttaaacaaaaccctgcaatcctaaatttgaattagaaatatcagtaaaaattcatggggtttttggtttgtttgttgttgttgttgttgtttttagagataataccagtattgcctagctctgcccacagaaaaagcctaaaaatgatgggcaaccaggcgcgtgtggtggctcacgcctgtaat

SEQ ID NO: 140 - protein, 51 aa, Homo sapiens
MWLLTLFLHTQRSVKSYILFVIYMNPSDNMNVIVSSMITKKSLEIISLYCC

SEQ ID NO: 141 - DNA, 285 bp, Homo sapiens
  misc_feature (1)..(31): wherein any n is one of a or t or g or c
nnataggagtaaatcatgtcgcgcattggcnggcttcccatcgccgtcccgtccggtgtcgaggtgaagcttgatgggcagtacgtggaggtgaagggtcccaagggaaccctgaacttcaccgttcgcgaacccatcaccgtgagcaagaatgatgagggcgcgatcctcgttgagcgtcctgacgatgagcgtgagaatcgctcgttgcacgggctgactcgcaccctcatcaacaatatggttatcggtgtgaccgagggctacgagaagaagctggagatc

SEQ ID NO: 142 - protein, 90 aa, Homo sapiens
  VARIANT (6): wherein Xaa may be any one of Arg or Gly or Trp
MSRIGXLPIAVPSGVEVKLDGQYVEVKGPKGTLNFTVREPITVSKNDEGAILVERPDDERENRSLHGLTRTLINNMVIGVTEGYEKKLEI

SEQ ID NO: 143 - DNA, 402 bp, Homo sapiens
gcgtgggatatcgatacccgtcttgagcaggccatggacgccttgcagtgcccccctggcgatacccctgtcgacgtcttgtcaggcggtgagcggcgtcgtgtcgcgctatgcaagctgttgatcgagcagcctgacctgctgcttctcgacgagcccaccaaccacctggatgctgagtctgtcaactggttggagggacacctcaagtcctatccgggagccgtgctagccgtcactcacgaccgctatttccttgaccacgtcgccgaatggatctgtgaggtcgatcgcggccagttgcacccctacgagggcaactactcgacgtacctggacaccaagcgcaagcgtctccagatcgaaggcaagaaagacgctaaacgcgccaagatcctcgag

SEQ ID NO: 144 - protein, 134 aa, Homo sapiens
AWDIDTRLEQAMDALQCPPGDTPVDVLSGGERRRVALCKLLIEQPDLLLLDEPTNHLDAESVNWLEGHLKSYPGAVLAVTHDRYFLDHVAEWICEVDRGQLHPYEGNYSTYLDTKRKRLQIEGKKDAKRAKILE

SEQ ID NO: 145 - DNA, 349 bp, Homo sapiens
atccaccactgggccgccattctcttcgtggcagcggccactgtgcacatgctgcgtatcttctttaccggtgccttccgcaaaccccgtgagatcaactggttgatcggcctaggcctgttcatgctggccatggtcgagggcttcgccggctactcgctacccgatgacctgctgtccggcactggcctccggttcgccgatggcctaatgcgcgccatcccgctagtaggcacctgggttgagttcttcgtcttcaacggcgagttcccgggcactgcaattgtcccccgcctgtacatggtgcacatcctgctcatcccagccctgctcctgggactagtggcca

SEQ ID NO: 146 - protein, 116 aa, Homo sapiens
IHHWAAILFVAAATVHMLRIFFTGAFRKPREINWLIGLGLFMLAMVEGFAGYSLPDDLLSGTGLRFADGLMRAIPLVGTWVEFFVFNGEFPGTAIVPRLYMVHILLIPALLLGLVA

SEQ ID NO: 147 - DNA, 395 bp, Homo sapiens
ggatcccgggtcttccgtttctcccacctccggctcctttaaaaaccaagcttacccaacgctgcccaaccgccgatggccttcttctcggagcctctggacaccgcccaatcgccggtccccgtcttccgggatggtgagaaactaagtgaagccacctggcggccatcatccctaggggcaggaagccaaactgagtggcgccgccatgatggttgagggcagatgtcttagtcctcgttgaaccgtggtggaccgggtggcgtcatcttttgagggccatatacaatgccaggtttcttgatatgttgaggcaaccgattgaagctagagtgccgccacgctttttaagggcatcttccggttctttcgttcttaggccaataaacgtcgac

SEQ ID NO: 148 - protein, 57 aa, Homo sapiens
MMAARWLHLVSHHPGRRGPAIGRCPEAPRRRPSAVGQRWVSLVFKGAGGGRNGRPGI

SEQ ID NO: 149 - DNA, 398 bp, Homo sapiens
atctggatgcagctgctcaatgtcgagcagatcgggcgccacgaccatttcttcgacctgggcggccattcgttgctggccgtcagcctgatcgaacgcatgcgtcaggccggcctgagcgctgatgtccgcgtgctgttcagccagccgactcttgcggccctggctgctgccgtgggcggtaggcgtgaaatcgtcgtcccggccaatgccatcccgaccccttgcgcgcacctcaccccggacatgctgcccctggtcactctcgaccaggccgctatcgaccgggttgtggctaaggtgccgggcggcgcggcgaacgtgcaggatatctacccgttggcgccgctgcaggaaggcatcctctatcaccatcacctggccgtggaccacgtcga

SEQ ID NO: 150 - protein, 132 aa, Homo sapiens
IWMQLLNVEQIGRHDHFFDLGGHSLLAVSLIERMRQAGLSADVRVLFSQPTLAALAAAVGGRREIVVPANAIPTPCAHLTPDMLPLVTLDQAAIDRVVAKVPGGAANVQDIYPLAPLQEGILYHHHLAVDHV

SEQ ID NO: 151 - DNA, 410 bp, Homo sapiens
agatcttttgcagggacacagttcaactcaaagcacctacaagtgtcacatggtcaacttctccgtgtgctaatattacccttcttatttcatcttttatttttctctattttccttttgtccctattacctagattacttagtttttccttaattatatacatctttggctggatttgaaaggaagaagacagaaaggaagggaaggaagaagagaaggagggaggaaaagagagaaggcgaaggaggaagaaaagcctgtcccctaaaattagacatgaaaccaggggaacagagttgttggaatggggagccacggtgggagagactgactgggaaagtgtttttgctgtgtgcttcatcagaacctcagaattactttttttgaggggatggatgcagtggctagc

SEQ ID NO: 152 - protein, 90 aa, Homo sapiens [sequence omitted]

SEQ ID NO: 153 - DNA, 284 bp, Homo sapiens
  misc_feature (284): wherein any n is one of a or t or g or c
tgatcatccctggggattacttaacgctactgagcttgtccgcctcgttaagcgggttcacccatagacatgcatcggtagagagggtgcgtgacatgggctgtgagctctttaatgttggcgctctcggcttccaccactacaccctcaacaggtctcgtgcgaccacagagcttcggaccatgctggcgcggcggcgcctcgaacgggctggttcgcctcggaacgatgaggcgatttctgcttcctgagcccgactaccgctaaccgttgggtagggcggn

SEQ ID NO: 154 - protein, 51 aa, Homo sapiens
MGCELFNVGALGFHHYTLNRSRATTELRTMLARRRLERAGSPRNDEAISAS

SEQ ID NO: 155 - DNA, 264 bp, Homo sapiens
  misc_feature (17)..(256): wherein any n is one of a or t or g or c
tatggcttgacgaagtntgtcgagaccacgaccggcccgctgggcgccggtgttgccaacgccgtcggcatggccatggcagctcgtcgtgaacgcggcctgctcgacccggacgccgctcccggtacgagccccttcgaccactacatttacgccattgccggtgacggctgtatgcaggaaggcattgcgtctgaggcttcgtctctggcggggacccaggaactgngcaacctcatcatgttctacgacgacnaccggatc

SEQ ID NO: 156 - protein, 88 aa, Homo sapiens
  VARIANT (6): wherein Xaa may be any one of Cys or Phe or Ser or Tyr
  VARIANT (77): wherein Xaa may be any one of Arg or Cys or Gly or Ser
  VARIANT (86): wherein Xaa may be any one of Asn or Asp or His or Tyr
YGLTKXVETTTGPLGAGVANAVGMAMAARRERGLLDPDAAPGTSPFDHYIYAIAGDGCMQEGIASEASSLAGTQELXNLIMFYDDXRI

SEQ ID NO: 157 - DNA, 425 bp, Homo sapiens
ctcgagatgcaacagaatgccgcgcgcgactcctgggatttcgacgcgaccgaagctagactgcagcagattatggccgacatccacgatcgttgcatcgagaccgccgacgagtatggccacccgggggattacgttatgggtgccaacatcgccgggttcaccaaggtggctgacgccgttatcgcgatgggtgtcgtctgagtgccgctactgcctcgtcgacggtgtcgacgaggcgaatgcggtgagggtggtcccgtgacatgctgtgcagcagcggccaggccggtagggtctggctccagtagcggttgccaagcatgatgagcggggtcatctcgtcttcgctggtggcgtagtagttaccagtgagagcttggaagatttcctggacggtgcccgcttggccaggtaggtcaatg

SEQ ID NO: 158 - protein, 67 aa, Homo sapiens
LEMQQNAARDSWDFDATEARLQQIMADIHDRCIETADEYGHPGDYVMGANIAGFTKVADAVIAMGVV

SEQ ID NO: 159 - DNA, 429 bp, Homo sapiens
  misc_feature (257)..(429): wherein any n is one of a or t or g or c
gccgagaaggccggcgccgatttcgtcaagacttcgacgggattccacccacgtggcggcgcaagcgtctaggccgtcaaggtcatggctgacactgttggtggacgtctgggcgtcaaggcgtccggcggcatccgcgactaccagacggcatgcgcgatggtcgaggccggggcgacgcgtctaggagtgtcctcgaccgccaagatccttgccggagctcccacggagtgacgccatgcgtatcgtttacgctntcaaaacacgggctgagtcgacgacggattaacctcagccgcgcccttggcggcagcctcgcgacgtttccagttaatcagccacgagacctcnttgcacaatanttggcgtctcgacgccgagtantacgagcgcggcgaatggcccagaccgtcatatacaacgcttttn

SEQ ID NO: 160 - protein, 53 aa, Homo sapiens
AVKVMADTVGGRLGVKASGGIRDYQTACAMVEAGATRLGVSSTAKILAGAPTE

SEQ ID NO: 161 - DNA, 372 bp, Homo sapiens
gtcgacacccattgcctgcaactgtttttttacaaaccgctgagccaggacaatctgtttcactcgatgcttggtctgctggaagtgcgcagcagcgtgtatcagccggcgctggacatgtttgccggttgtcgcggcgcgggtgatcgacggcgtgttggccaagcagtgaagcgtttcctgcccgtcgcgccaatgcgacgggtctttctgtttctgctgtcagactattcttgctgacaggcaagacatttccttacagctcttgcccttcaaaggcgcgtaaatcgtcggtggcgatatatactgcgcgccattcttcaagggagagccgcgtggctatcgatattcactggattcgcgacaacgaaa

SEQ ID NO: 162 - protein, 57 aa, Homo sapiens
MLGLLEVRSSVYQPALDMFAGCRGAGDRRRVGQAVKRFLPVAPMRRVFLFLLSDYSC

SEQ ID NO: 163 - DNA, 411 bp, Homo sapiens
  misc_feature (40): wherein any n is one of a or t or g or c
ctgcgtaccgtcgagacgggtggcgactgctgggaagccnaacgcgagcagtgggatgacggcaataatgtggtagctctcgagcccggtgtcgtcgttggatacgaccgcaacaccgcgaccaatgctttgctcgcgaaggccggggtggaggttgtcgagatcaagcccgccgagctgggacgtggtcgagggggcggccactgcatgacctgcccgatcactcgtgatccggtggattactgataagtcccaaagcgaaacaggtaatatgcgtccgccgcacgaagcggacatatcaaggaaagaatatcagatcatggcttttaatctgaagaatcgtcatttgttgtcgttagcgcatcatagtactgaggaaatcaagttcctcgtcggcttggctgcagatct

SEQ ID NO: 164 - protein, 81 aa, Homo sapiens
  VARIANT (14): wherein Xaa may be any one of Glu or Gln or Lys
LRTVETGGDCWEAXREQWDDGNNVVALEPGVVVGYDRNTATNALLAKAGVEVVEIKPAELGRGRGGGHCMTCPITRDPVDY

SEQ ID NO: 165 - DNA, 324 bp, Homo sapiens
  misc_feature (1)..(2): wherein any n is one of a or t or g or c
nnccatggctccggcggctacggcggccccctcaccatcacccctaccgaggctaaacacaagctcgtctacatcgtcggcggaggcgtccggcccccggtcgttgatcgcatcgccgagctgtctggtgccgaaccggtcaatgggtttaacacctccatccccgacgaggagatgatggccgtcatcatcgactgcggggggaccctaaggtgcggaatctaccctcgcaagggaatcccgactatcaacgtcatgccaaccggtaagagcggtccgctgacccaatacatcaacgagtcgatctacgtctccgccgtcgac

SEQ ID NO: 166 - protein, 108 aa, Homo sapiens
  VARIANT (1): wherein Xaa may be any one of Phe or Ser or Tyr or Cys or Leu or Pro or His or Arg or Ile or Thr or Asn or Val or Ala or Asp or Gly
XHGSGGYGGPLTITPTEAKHKLVYIVGGGVRPPVVDRIAELSGAEPVNGFNTSIPDEEMMAVIIDCGGTLRCGIYPRKGIPTINVMPTGKSGPLTQYINESIYVSAVD

SEQ ID NO: 167 - DNA, 296 bp, Homo sapiens
gtcgacttcggcactcgtcctgacggcagtccggtgttcatccgtacccagactatttgtgggcaggtccagggcgagaaagctttttacaccatgtcgggggtgtcggggcatgcagggctgttctccaccgctgacgatctgggggtgctgctgcagttgatgtccaacgagggcatgtatcagggccgtgagtacttcccggccgatgtgcagcgtcggtttctcactcctgatggtgatagcgagacttacgggctgggttggagaacgaacgggtactactacttccatgg

SEQ ID NO: 168 - protein, 98 aa, Homo sapiens
VDFGTRPDGSPVFIRTQTICGQVQGEKAFYTMSGVSGHAGLFSTADDLGVLLQLMSNEGMYQGREYFPADVQRRFLTPDGDSETYGLGWRTNGYYYFH

SEQ ID NO: 169 - DNA, 295 bp, Homo sapiens
  misc_feature (1)..(2): wherein any n is one of a or t or g or c
nncgagcggttcggaacccttgaaactgactacgaactgctcactcacctcaacccagatcgcgacaatatggtcgccttccaggccaccgtggggctgggagagaaagtggacgggcattgcgtgggtgagttcaccgtcgccgatcttatcccggaggcattgcgtcaaaacctctcgcgtttggtggtgggcgaggtccgtggcgtcgaggcggctgccatgttcgaggcgatgcaggccggtgccggaacgatgagcaccacccactcccactcggccacctcgaccatgg

SEQ ID NO: 170 - protein, 98 aa, Homo sapiens
  VARIANT (1): wherein Xaa may be any one of Phe or Ser or Tyr or Cys or Leu or Pro or His or Arg or Ile or Thr or Asn or Val or Ala or Asp or Gly
XERFGTLETDYELLTHLNPDRDNMVAFQATVGLGEKVDGHCVGEFTVADLIPEALRQNLSRLVVGEVRGVEAAAMFEAMQAGAGTMSTTHSHSATSTM

SEQ ID NO: 171 - DNA, 428 bp, Homo sapiens
  misc_feature (1)..(2): wherein any n is one of a or t or g or c
nncgaatcgacccttgttgccatgtggccaatagtccccgtctggctgctcaccctcattttcctggtcgtcctcaccgcaatcaacctgctgggagctgacagattcggagagttcgagttctggtttgccctgcttaaggtggtcgccgtcgtcgtcttccttgccatcggtgtgctgcttatctgcggagtcttggcggctcccgcagcgggaacatccaacctcgtcggccacggcggattcctgcccaatgggtggtctggggtggcgacggccctgcttttggtcgccttcagcttcggcggtatcgagattatggcggtggcggctgccgaaaccgaagaccctgcccacaatgtctcccgggctgtgcgcggaagaagataaagagcggagagcgcccgctcataaggggatggccatgg

SEQ ID NO: 172 - protein, 129 aa, Homo sapiens
  VARIANT (1): wherein Xaa may be any one of Phe or Ser or Tyr or Cys or Leu or Pro or His or Arg or Ile or Thr or Asn or Val or Ala or Asp or Gly
XESTLVAMWPIVPVWLLTLIFLVVLTAINLLGADRFGEFEFWFALLKVVAVVVFLAIGVLLICGVLAAPAAGTSNLVGHGGFLPNGWSGVATALLLVAFSFGGIEIMAVAAAETEDPAHNVSRAVRGRR

SEQ ID NO: 173 - DNA, 360 bp, Homo sapiens
  misc_feature (15)..(340): wherein any n is one of a or t or g or c
ccatggggctcccanaactgaagtagatgggtcagctgtgagaagctcactgcctggtacggagcattggatggattgaaaatcatggaacagtccctggctgagtcatgagccgttgccacgctgcctgaaaataaacgcagaaacttgttcatggacttcctccttccacctctcacccccctccacttacgttaggaagaaagatgattagaggttcccaggccgtgngcaccatccnagtgtgctggagaacttggaggagaagaaagaactcaactttatggctctgtcggatatgagtagcccacatcactctcctgtntgggacagtgaaaangaaaagtctctgattccgct

SEQ ID NO: 174 - protein, 51 aa, Homo sapiens
  VARIANT (47): wherein Xaa may be any one of Leu or Phe
MNKFLRLFSGSVATAHDSARDCSMIFNPSNAPYQAVSFSQLTHLLQXWEPH

SEQ ID NO: 175 - DNA, 342 bp, Homo sapiens
  misc_feature (1)..(4): wherein any n is one of a or t or g or c
nncncagccgacatgttgcccgcgattcgtcgtcgcgacgtgctcgtccatcacccctacgactccttcgccaccagcgtgcagcggttcatcgagcaagctgctcaagaccccagggtgctggccatcaaacaaaccctgtaccgcacttccggcgactcccccatcattgacgccctcgtcgatgccgccgaggctggcaagcaggtgctggcggtcgtggagattaaggcgaggttcgacgaacaggccaacatcacctgggcccgactgctggaacgggccggagtccacgtcgtctacggcatggtgggcatcaagacccactgcaagttggccatg

SEQ ID NO: 176 - protein, 114 aa, Homo sapiens
  VARIANT (1): wherein Xaa may be any one of Phe or Ser or Tyr or Cys or Leu or Pro or His or Arg or Ile or Thr or Asn or Val or Ala or Asp or Gly
  VARIANT (2): wherein Xaa may be any one of Ser or Pro or Thr or Ala
XXADMLPAIRRRDVLVHHPYDSFATSVQRFIEQAAQDPRVLAIKQTLYRTSGDSPIIDALVDAAEAGKQVLAVVEIKARFDEQANITWARLLERAGVHVVYGMVGIKTHCKLAM

SEQ ID NO: 177 - DNA, 330 bp, Homo sapiens
gtcgacaccctgcgtttagcccaatgagacccaatttggacttctcacgtgtagaacgataaggtagtaagtttgggtcatttaatgagcctggtcattcatgaacagcagccatggaagatgatgcgggggtagttagtctggagaagagctgagaagtggctcccccgccatgactggagtgcacacgggcacacatccacaagcacaggagacactccccacagccttcccagcccagcatggcaggcattctgagctccattctgtagagacccaagcaggcgtccttccttgttcaggggtccacacccagtgcacagcagatct

SEQ ID NO: 178 - protein, 56 aa, Homo sapiens
MELRMPAMLGWEGCGECLLCLWMCARVHSSHGGGATSQLFSRLTTPASSSMAAVHE

SEQ ID NO: 179 - DNA, 309 bp, Homo sapiens
  misc_feature (1): wherein any n is one of a or t or g or c
nggatccagcagctggaagcgtcgctcgagcgcctcgccaacctcccgttcggcttcgggccgcgctacgtcgtcgtcaacattccggcgacctatgcggaggcgatcgagaacgacaaggtggtgcggcgctatcgcgtgatcgtcggcaagaccgagaagccgtcgccgacgctgacggccgagatcaccgaggtcaatctcaacccgacctggacggtgccgcagtcgatcgtcaagaacgagatcgccgcgcacatgcgcaaggacccgtcctacctcggccgcatgcacatgcagctggtcgac

SEQ ID NO: 180 - protein, 103 aa, Homo sapiens
  VARIANT (1): wherein Xaa may be any one of Arg or Gly or Trp
XIQQLEASLERLANLPFGFGPRYVVVNIPATYAEAIENDKVVRRYRVIVGKTEKPSPTLTAEITEVNLNPTWTVPQSIVKNEIAAHMRKDPSYLGRMHMQLVD

SEQ ID NO: 181 - DNA, 384 bp, Homo sapiens
  misc_feature (329)..(381): wherein any n is one of a or t or g or c
ctcgaggttccggacgagatgatctcgaccctttacgaggaggggagcgtcgtcgattcgattttcgacgagattccggtgcacgccggactggtgttggaggggccgaacggaacagctttggctcggcggatgtcggacgcctctgcccgtcttgtcccgaatgatcaggaagctttcgggattcgcggccgctccgcagaacagcgaatagcactcgatatattgcttgatccccaggttggaatcgtctcgatgggaggacgggccggaacagggaagtcagctctcgctctatgcgcaggtcttgaggcggtcatggaacgccnactccacaagaaggtcatggtgttccggccgctctatgctgtggggggccangat

SEQ ID NO: 182 - protein, 128 aa, Homo sapiens
  VARIANT (110): wherein Xaa may be any one of Arg or Gln or Leu or Pro
  VARIANT (127): wherein Xaa may be any one of His or Gln
LEVPDEMISTLYEEGSVVDSIFDEIPVHAGLVLEGPNGTALARRMSDASARLVPNDQEAFGIRGRSAEQRIALDILLDPQVGIVSMGGRAGTGKSALALCAGLEAVMERXLHKKVMVFRPLYAVGGXD

SEQ ID NO: 183 - DNA, 436 bp, Homo sapiens
accggtgacgcggctttcattgccgaagcaatggccgttgttacacgcgccaagaattcgtatcgaggcagatggccgagcccaggagtcatcgtcctgaacgtgtgttgctagtagcaacgccttgacgctgatcacttggtgaaaagcagcctccagagccccacagcttcgtatagataggttcgcataatgtatattatgttaaatcatatattatgtcagaaaggcatgtcgatcagtaaatgggtcaagcgagtcattccgtgtgcggcaaccaaagacgctggatgaaccctcggccagaccaaagactccataaggataatcaactcaccgccttcgtttccctgaatccttgcggtgggttccgtcgtgttatttgcagaaggtataaaaaatgctcgcacgctggcgctgggtgctacaccaattg

SEQ ID NO: 184 - protein, 63 aa, Homo sapiens
MGQASHSVCGNQRRWMNPRPDQRLHKDNQLTAFVSLNPCGGFRRVICRRYKKCSHAGAGCYTN

SEQ ID NO: 185 - DNA, 458 bp, Homo sapiens
gaattcatagtaattggtctaataaatgcataatctaagctgctatttttaataaatgagacgccaaattatcttaacacaaacaacacagaatcttattttgcttcacttcgggatcctaactggatcttccaactcaactgccataatcttttgttttgcttttttttttttttttttctttttccatctaactgtggcgggaattcaaaaaaacccggaagggccatatccattttcttttggttcaaaccttcaaattttaaatatttttttcccattttttcccccacaaacggggttcggaaaaaggttggagtttttcaaacccaaatcccaccacattgggggccttatataattgtatccaacctcggttccaagtttgggttattcatggtcaaatctttttcttttttaaatttttttcgctcccaatccccacaacatcagcggca

SEQ ID NO: 186 - protein, 101 aa, Homo sapiens
MRRQIILTQTTQNLILLHFGILTGSSNSTAIIFCFAFFFFFFFFHLTVAGIQKNPEGPYPFSFGSNLQILNIFFPFFPPQTGFGKRLEFFKPKSHHIGGLI

SEQ ID NO: 187 - DNA, 359 bp, Homo sapiens
ggatcccaccgtttgtcccatgcgcatgcgcatgcgcatggcgtggatctgccgcacgtcgcactagcggtcctaggacccacctacgggagctgtggcgtggcgttccgaaagagcgctgcacgagcaatgggacggaggggacgactgcaggaccagcgactgcagcagcgcgtcgggcggaaaatttcgatgctcttcgagcttcaaatgttacacaatgcaccccagcagagcgtagaggcgcccgcgatggagagacaggcagtggaccctgaggcttgaagctgcggaactggaacgggggctgggctggggacaggggaggaagcggaagcgacttggcggcagcggcgcgc

SEQ ID NO: 188 - protein, 51 aa, Homo sapiens
MGRRGRLQDQRLQQRVGRKISMLFELQMLHNAPQQSVEAPAMERQAVDPEA

SEQ ID NO: 189 - DNA, 354 bp, Homo sapiens
tgtacacatttttataatgcaagatctctagtgtccctcatttctcctgggaggagattgatacacatatcaaagagctgccctgagggtaaaggtactgtttagaaagtatcccatataagctcgacctgtaagcacatgcctgtattcccagcacttgacagagggaggaagatgatggaatcagaacaggatgggctacaaaggaagacctctgtgtttctcttctttctctgctcgccctatccttcattccccccctttctttctttctttctgtcacgttttattcttcacattgagattaatgaacttgaaaaagtaaattaccaaacaccattgttcagacaattg

SEQ ID NO: 190 - protein, 72 aa, Homo sapiens
MPVFPALDRGRKMMESEQDGLQRKTSVFLFFLCSPYPSFPPFLSFFLSRFILHIEINELEKVNYQTPLFRQL

SEQ ID NO: 191 - DNA, 457 bp, Homo sapiens
acgcgtgccggtcaggctgcgtagccctaggaccatgcagtcgctatgaccagacaccagcggggcgatgacgggcgtggagcaggttttggagactgaccggacggcggcgccgaagccgaaatcgcgccgcgaccaccgggtcgatgcgctgcgcggcatcgcgctgacgatgatgttcgtcgaccacatgccgcagaacgtgctcaaccgcttcaccatccgcaatgtcggcttcgcggacgcggccgagatcttcgtgctgctggccggcttcgcctcgatgctggcctatggcggcgcaatccgccgcgaggggctgtggatcggtttcgatcgcatcgtgcgccgctgcatcaagctgtatctgttccagtgcgggctgctggtggcgatggtgttcctcatccgcgcctggaaccgccacgtctcgcccgccccggtcgattatctcgag

SEQ ID NO: 192 - protein, 130 aa, Homo sapiens
MTGVEQVLETDRTAAPKPKSRRDHRVDALRGIALTMMFVDHMPQNVLNRFTIRNVGFADAAEIFVLLAGFASMLAYGGAIRREGLWIGFDRIVRRCIKLYLFQCGLLVAMVFLIRAWNRHVSPAPVDYLE

SEQ ID NO: 193 - DNA, 365 bp, Homo sapiens
ctcgagctaagctatctttaataataccaattcttcagcgagctcctcctaggtggattcacatataggcccccccagagagaggcacctctgcggaaatgaacattgacctcacgtggctgagtcttctgcagcaaggggatgccatccctgcggctcctagagccacgtgttgctggggcgcatttacacctggcaccgggatgggcggtgcgttgaggcgcttggaggatcccacctgggcggggagactgagcgctgatgttagctggagctgcctcagcattttgtgttcttgatcacatttcacagggatttcactcccgcccgagcaccctctttcggctgctgctgacgggacgcgt

SEQ ID NO: 194 - protein, 75 aa, Homo sapiens
MLRQLQLTSALSLPAQVGSSKRLNAPPIPVPGVNAPQQHVALGAAGMASPCCRRLSHVRSMFISAEVPLSGGAYM

SEQ ID NO: 195 - DNA, 455 bp, Homo sapiens
  misc_feature (455): wherein any n is one of a or t or g or c
ggtacccttacagagagggctttatggtgaagggctaaggcttccagccagcagctatgtgagggcaccatcttggaagcagatctttcagcctcagtccagccttcagatgactctgcaactccagccatcagcttgagtggccctgagcaagaaccaaccagcttaaatggctcccaagttcctggcctcctgcctggctaggtgcagtcttacagccactgtcactaccatgtccgttttcttctttcctcctaatgcttacgggctcttcttgccattttctcctgtcccatacctgttgggcagctccagtgatgaagggtttcttcttcttgtgtcctcacttgtttgttctctccctcatagttactgaccactctgggcttggctctggtgagtccccgagccaactccgccgcgggccccttccccagcccggctctcgagcggcn

SEQ ID NO: 196 - protein, 68 aa, Homo sapiens
MAPKFLASCLARCSLTATVTTMSVFFFPPNAYGLFLPFSPVPYLLGSSSDEGFLLLVSSLVCSLPHSY

SEQ ID NO: 197 - DNA, 354 bp, Homo sapiens
tacaatatatctcgaatatatggtccatctgattctgccagccgggatttatgggtgaacatagaccaaatggaaaaagataaagtgaagattcatggaatattgtccaatactcatcggcaagctgcaagagtgaatctgtccttcgattttccattttatggccacttcctacgtgaaatcactgtggcaaccgggggtttcatatacactggagaagtcgtacatcgaatgctaacagccacacagtacatagcacctttaatggcaaatttcgatcccagtgtatccagaaattcaactgtcagatattttgataatggcacagcacttgcggtccagtgggaccatgta

SEQ ID NO: 198 - protein, 118 aa, Homo sapiens
YNISRIYGPSDSASRDLWVNIDQMEKDKVKIHGILSNTHRQAARVNLSFDFPFYGHFLREITVATGGFIYTGEVVHRMLTATQYIAPLMANFDPSVSRNSTVRYFDNGTALAVQWDHV

SEQ ID NO: 199 - DNA, 443 bp, Homo sapiens
tgtacagctagttagatgaatgtaaacagattgaagcttcagtaaacagttggtgaaacgttgttttaccagggagaatgatgagtggtaaaggtggctttttggctacccgaacgatggggtagccctttgtagtagggggctgtaaatgtagttcatatcgcatagtatgccaagcctgtggaacgcattgtgcgtaagaaaatttaaccagcagtaaaaggcataagaatgtttatccgagactggaagcagctcgcctggtgcgtatttgacgtactcgcctggctgattgcgctgtccgccgctaacggaatcgtccgcggtgaattggtatctttctctgaaatatcaggcactaattttttggttgtcgctgtcgccgtggccgtcatcgtcctgctcggcctgctgctcggggagtacaccaacccacaacgcgt

SEQ ID NO: 200 - protein, 70 aa, Homo sapiens
MFIRDWKQLAWCVFDVLAWLIALSAANGIVRGELVSFSEISGTNFLVVAVAVAVIVLLGLLLGEYTNPQR

SEQ ID NO: 201 - DNA, 421 bp, Homo sapiens
tgtacaattattatatagcaatagaaagagagggctagaaaaattcaagtcttattcctcttgttatgctgttcagtagggctgaggctggcccgttcctggccttctggccccaaaggtcattattcagccacagcacaccctctggttggcttcatcactggctttctctgcatattagagtgatccagacctgctatgccttactggctgtactgcagaaatgctttctatgctctgactataaggttgttaaatccttaaagcttgttagggcagggcttcaaaactcttgcttggggttaatggtgtcttgtgatgcagagagcaagctgcctcacatgttaagaggaaatttctgtggctgagaatatcttgaaagacagagtttagccaggaactcttgaggataaacaagctt

SEQ ID NO: 202 - protein, 100 aa, Homo sapiens
MLFSRAEAGPFLAFWPQRSLFSHSTPSGWLHHWLSLHIRVIQTCYALLAVLQKCFLCSDYKVVKSLKLVRAGLQNSCLGLMVSCDAESKLPHMLRGNFCG

SEQ ID NO: 203 - DNA, 414 bp, Homo sapiens
  misc_feature (1): wherein any n is one of a or t or g or c
nctaaaagccaaatctatttttttctcatctttgcaataactcaaagtgcctagcatggtgaaattatgtaaaattgaaccaagatatgcttctctatacagaaggaatttaacatggagtcactccacaagtactggtttttccaatggagaaatgaataagaatggactcgttctgctaagaggaaagctcaatctcccatggtgcagaatgaagctgtctgtgaagtgctctgcagagtactcaaaccggaagccagatcacggaggcctggcgtacctgcagcagtggctctcaaactattttaccccaaaataaacttggtgatttgtttagaatacaagttcccttgttttagcttcctacagtctaattgtgttgccccaggcagaagcgcatgagtcagatgtaca

SEQ ID NO: 204 - protein, 87 aa, Homo sapiens
MVKLCKIEPRYASLYRRNLTWSHSTSTGFSNGEMNKNGLVLLRGKLNLPWCRMKLSVKCSAEYSNRKPDHGGLAYLQQWLSNYFTPK

SEQ ID NO: 205 - DNA, 395 bp, Homo sapiens
acgcgtggtgccgaaatccttccaagcatcgaggccgcgctgcgcgaggcagacgcggccggtgtccctgtacgctacctacacaagggcaaggatgctcgcgtcgacagctattcggcatttgcgtccaaccaatacacgcactttactgagctcgtgccgatgctgttccgcaccgagcggccgatccgcaacgtgatcgtatgcgggctcgccacagactactgcgtctgctcgacagccatcgatgctgcgaagctaggcttccgcacctgcgtagtccgcgacgcggtccagggcgtcgcggaagcgaccagcatcgaggcggtgcgcactatggagagctacggcatccgcgtacttgcatcgcacaaagaccttttgtactatgtaca

SEQ ID NO: 206 - protein, 131 aa, Homo sapiens
TRGAEILPSIEAALREADAAGVPVRYLHKGKDARVDSYSAFASNQYTHFTELVPMLFRTERPIRNVIVCGLATDYCVCSTAIDAAKLGFRTCVVRDAVQGVAEATSIEAVRTMESYGIRVLASHKDLLYYV

SEQ ID NO: 207 - DNA, 364 bp, Homo sapiens
tgtacaaaataaaacactttctcaccaaaattagctaacttgagatgctgatacaaccagtaagtgaaagaactaagatctgagtcgtctgtcatttgtcaaactctaaaatctgcactcctattactgcttccccaaatagtacaatttaaatactctagggacagcatcatctacatatgtttaacctatgtaaagattagtgctatggaaggaaaagatatccagtgacagaaattttcttccttttctttccctttctttacccttttaaaacattttatatctattttgtttccaattggtactaatttcacatgacacataattttccttttggccccagacattttttccatctcat

SEQ ID NO: 208 - protein, 56 aa, Homo sapiens [sequence omitted]

SEQ ID NO: 209 - DNA, 265 bp, Homo sapiens
atctcactcactccgttggaatactccctgctcgttacgatggcccaataccccaatagggtattcagcagggagaccctattgcgtgaggtatggggatacaccaacatcaccgatactcggttggtcaacgtccatgtgcagagactgcgttctaaggtggagcgcaacgcggaccatccccagatgatcgtcactgttcgtggcatcggttaccgcatcaacacccctggggaggaaagctgatcatcctggcggggcgcgc

SEQ ID NO: 210 - protein, 81 aa, Homo sapiens
ISLTPLEYSLLVTMAQYPNRVFSRETLLREVWGYTNITDTRLVNVHVQRLRSKVERNADHPQMIVTVRGIGYRINTPGEES

SEQ ID NO: 211 - DNA, 268 bp, Homo sapiens
gcgcgccgcttccgcggctacctgccggtagtggtggacgtcgagaccggcggcttcaactcggccaccgacgcgctgctggaaatcgccgcgaccactgtcggcatggacgagaaaggcttcctgttcccggaacacacctacttcttccgcatcgagcccttcgaaggcgccaacatcgagccggccgcgctggaattcaccggcatcaagcttgaccacccgctgcgcatggcggtgcaggaggaagcggcactcaccgagatct

SEQ ID NO: 212 - protein, 89 aa, Homo sapiens
ARRFRGYLPVVVDVETGGFNSATDALLEIAATTVGMDEKGFLFPEHTYFFRIEPFEGANIEPAALEFTGIKLDHPLRMAVQEEAALTEI

SEQ ID NO: 213 - DNA, 245 bp, Homo sapiens
  misc_feature (245): wherein any n is one of a or t or g or c
agatcttgaagtacatgagtgtattccgtttattaatgaatatatgtgcacagcaggcctgagttgctcaaaccctgcacatgccaaagacaggcccttgaccagctcctgagagagaacctctaagcccttggaatatgccacctgataagagtgtttttttatgctgaggtcttgggccacgcagtattggtttggcttctgggatggtaaagggagagtagctagtgtcactcatatgggan

SEQ ID NO: 214 - protein, 56 aa, Homo sapiens
MSDTSYSPFTIPEAKPILRGPRPQHKKTLLSGGIFQGLRGSLSGAGQGPVFGMCRV

SEQ ID NO: 215 - DNA, 291 bp, Homo sapiens
gccaccatcatcacttcgcggacctgcgccttcggatacgatcagcgcctagaggcatttggggccacggcatgctttagtgccgacaacctcacggacaccgcagtgcgcatggccactagtacccaaaccacgcgaagaccgatcatggactttttccttgagcgttacgaagacgcctaccgcatcgagttggaaaccttccttgactcggtcgccgtcggcggcgcggtttctccgtcggtgcgtgacggctatgaggctcttgtcctggccgatgcagctacgcgt

SEQ ID NO: 216 - protein, 97 aa, Homo sapiens
ATIITSRTCAFGYDQRLEAFGATACFSADNLTDTAVRMATSTQTTRRPIMDFFLERYEDAYRIELETFLDSVAVGGAVSPSVRDGYEALVLADAATR

SEQ ID NO: 217 - DNA, 282 bp, Homo sapiens
cgcgtgaacccctttggtttcattgagaccccgtaccgtcgtgttgttgatggttgtgccactgaccaggttgactacctcactgctgatgaggaagaccgccacgttgtcgcccaggctaactcgccgatggacgagaacagtcgcttcctcgacgagcgtttgctcgtccgtaagcgtggcggcgatgtcgaatacgtcaccccagacgaagtcgactacatggacgtttccccacgtcagatggtgtctgtagcaaccgctatgattccattcctcgag

SEQ ID NO: 218 - protein, 94 aa, Homo sapiens
RVNPFGFIETPYRRVVDGCATDQVDYLTADEEDRHVVAQANSPMDENSRFLDERLLVRKRGGDVEYVTPDEVDYMDVSPRQMVSVATAMIPFLE

SEQ ID NO: 219 - DNA, 439 bp, Homo sapiens
acgcgtcgtgcgtgctctccaggccgatggactgtcctcgcgtctgctcacgactgcacaacttcgatcggcggtggtgcacctctgtcggggggtgagtaccgacgatctgacacagacctggtcgacggcacccttgccgggtgtgtccagcgtcggtttcggaatagattgcagcgcaatcactgccgaggacattgccaccctgtggtcgactccatcattgaggacgacgatgaccttccatctgcagccgacccgcgacagcggaaagctccgcatccgtggatcgtgccgattcgccgcccgctcccgggtcgcgaaaccttctgtccgcggattgacctcgatgagcggaagtcaacgagacggcatcttcgctcaactacctctggccgttcccggactgaagtccctgtcccccagtggaactctcgag

SEQ ID NO: 220 - protein, 94 aa, Homo sapiens
MRSFPLSRVGCRWKVIVVLNDGVDHRVAMSSAVIALQSIPKPTLDTPGKGAVDQVCVRSSVLTPRQRCTTADRSCAVVSRREDSPSAWRARTTR

SEQ ID NO: 221 - DNA, 451 bp, Homo sapiens
ctcgagctcgggatcggccccgcccggcggctgcgtgatgctcacgctcggcaggccggtcaacgggtcaatggcggcattgtccgcatgaaagatgcaatagaggccgggctccatcgccatgatgttggccgagacgttcaactccgtcaccaggggctgcggcggagcgttctcagtcttggccatccagatccatccatttctgcggccgcgtccgcgcggccgtcatcagatcacaacccgcggggcgtcgagtcattcgaccccgaatcgcgtcgacacgggcaatcacatccgaacgtggctaagttgcggcgggaggattttttccgcaagacggtctcgtttcgccaccgaacgttgtgccgcgatcaggagttgccgacagatcatcgccggcggcaacgcgatcggcagtaccaccccgcgtcccgtgcgtcgcacgcgt

SEQ ID NO: 222 - protein, 121 aa, Homo sapiens
MKDAIEAGLHRHDVGRDVQLRHQGLRRSVLSLGHPDPSISAAASARPSSDHNPRGVESFDPESRRHGQSHPNVAKLRREDFFRKTVSFRHRTLCRDQELPTDHRRRQRDRQYHPASRASHA

SEQ ID NO: 223 - DNA, 450 bp, Homo sapiens
  misc_feature (1)..(31): wherein any n is one of a or t or g or c
nnacgcgtttccgagcgtctggagcgggtgntcacccacatggagtcggaaatcggcgtcatgcaggtggagaagcgcatccgcaaccgcgtgaagcggcagatggagaagacgcagcgcgaatactacctcaacgagcagatgaaggcgatccagaaggagctcggcgagggcgaggaaggccgcgacgagaccgccgagatcgaggagaagatcaagaagacgcggctgtcgaaggaagcccgcgacaaggcgatgggcgagctcaagaagctgcgcggcatgagtccgatgagcgcggaatcgaccgtggtgcgcaactatctcgactggattgtctcgctgccgtggaagaaacgcagcaaggtccgtcacgacatcgcggccgccgaggcggtgcttgatgccgatcattacgggttggagaaggtcaaggaacgtatcttcgaa

SEQ ID NO: 224 - protein, 150 aa, Homo sapiens
  VARIANT (1): wherein Xaa may be any one of Ala or Arg or Glu or Gln or Gly or Ile or Leu or Lys or Pro or Ser or Thr or Val
  VARIANT (11): wherein Xaa may be any one of Ile or Leu or Phe or Val
XRVSERLERVXTHMESEIGVMQVEKRIRNRVKRQMEKTQREYYLNEQMKAIQKELGEGEEGRDETAEIEEKIKKTRLSKEARDKAMGELKKLRGMSPMSAESTVVRNYLDWIVSLPWKKRSKVRHDIAAAEAVLDADHYGLEKVKERIFE

SEQ ID NO: 225 - DNA, 465 bp, Homo sapiens
  misc_feature (1)..(2): wherein any n is one of a or t or g or c
nnatatccatgcagccgcgttctcccgtttcgagcaggtcgagcgcaatctcgacgcgctggagggtcgttcggaggcctgggagctgggtcgccgcggcggcatcccgaccctgcatgacgagctggccgggctggagaacgacgtggtggtcgaggacgagctggcgaagctgaaggcgaagctggggcgcgacacgccgggcacctcgctcaccccgcacgagggcgagtgatccgacacggcggggccggcaaatgaaggaatcacacgatgcatgacctgcccggcctgctggccatcggcctgatcttcggcttcctgccctggatgctggtccgcgcgcgcgccgaccgccgccgccagttccagcaggtgcagacgctgagccaggaggaacagcgcgcgctcgacgagatgtgggaggtcacccgccgcatggagacccgcatcgccaatctcgag

SEQ ID NO: 226 - protein, 68 aa, Homo sapiens
RNHTMHDLPGLLAIGLIFGFLPWMLVRARADRRRQFQQVQTLSQEEQRALDEMWEVTRRMETRIANLE

SEQ ID NO: 227 - DNA, 318 bp, Homo sapiens
  misc_feature (1)..(106): wherein any n is one of a or t or g or c
nnattgcnntgtcccaaccgcgcccagnngtcntggaacgacgtcgaccaggcgcgctccggcatgccgtcggtgttcttcgaggacgggttcggcttcgagcgtnatgtcgagtgggtgctcgacgtgccgatgtatttcgtcgcccgcgacggacggttgatcgacgtcgcgggggcatcgttccgcgactggatgcgcgccggacgttcgggccgggcgagcgaggcactgcgcggcatcgagccgacgatcggcgacttcgccgatcacctgaccaccgtgttcacagacgtgcggctgaagcacttcctcgag

SEQ ID NO: 228 - protein, 106 aa, Homo sapiens
  VARIANT (1): wherein Xaa may be any one of Ala or Arg or Glu or Gln or Gly or Ile or Leu or Lys or Pro or Ser or Thr or Val
  VARIANT (3): wherein Xaa may be any one of Arg or His or Gln or Leu or Pro
  VARIANT (10): wherein Xaa may be any one of Leu or Ser or Pro or Gln or Arg or Met or Thr or Lys or Val or Ala or Glu or Gly
  VARIANT (36): wherein Xaa may be any one of Asn or Asp or His or Tyr
XLXCPNRAQXSWNDVDQARSGMPSVFFEDGFGFERXVEWVLDVPMYFVARDGRLIDVAGASFRDWMRAGRSGRASEALRGIEPTIGDFADHLTTVFTDVRLKHFLE

SEQ ID NO: 229 - DNA, 223 bp, Homo sapiens
  misc_feature (1): wherein any n is one of a or t or g or c
ntccccagtcgaatgcggtcagcaccaggagtaccaacgatgctgatatgggatgcccatcgaagtcgaccatctgggaggggcacgattgaggtactacgagatcattcatgcccgatctccctatagcacgtatctctctatcactaggtccagccggggctcctcggaaacgctaggccgcttcgggatgggccgtccaggaaagcgacgacgtccctca

SEQ ID NO: 230 - protein, 57 aa, Homo sapiens
MPIEVDHLGGARLRYYEIIHARSPYSTYLSITRSSRGSSETLGRFGMGRPGKRRRPS

SEQ ID NO: 231 - DNA, 422 bp, Homo sapiens
  misc_feature (422): wherein any n is one of a or t or g or c
ctcgagagctctgttcatttcctttaaactttttgtacttttttttttccagactggataatttctattgctgtgtcttctgttttaaatctatggctaaactcaaaagatttttttcatttccttatctataatttttttatatatatgttcatttctctgctgaagttccacattctttttgtttatgaatagaatattttcttttttccccatgaacatattcataaaaactgccttcaaattcttgtctgctgattgcaacatcctgggatagcttctactgcctgcttttgatattgtgtatggatgacattttcacgtttctttacaagtcttatgaattttaaaattgtgcactagaaactataaatgataattatagaatagaaactctggattttgttgtttaaccttgaagn

SEQ ID NO: 232 - protein, 54 aa, Homo sapiens
MLQSADKNLKAVFMNMFMGKKENILFINKKNVELQQRNEHIYKKIIDKEMKKIF

SEQ ID NO: 233 - DNA, 379 bp, Homo sapiens
ctcgaggaggagcgcaaggcgctggccggcgacatcaaggacatcttctccgaagcgaaatcggccgggttcgacgtcaaggtgatccgcaacatcatccgcatccgccgccaggagcccgccgaggtggaggagcaggagacgctgctcgacatctatcgccgcgcgctcggcatgtagggcagagccccctcaaacacggtttccgccgggcagcttgtcgcctatcctgtcgcgatgatgctgcccgcgattctgccggactggatgccgtggtggctgcagctgctgctgtggatggccggcgcggtggtcgcgctgggctggatcgcgatgccgttcgtcctgctcggcctgcgcagccggctcgcctacgcgt

SEQ ID NO: 234 - protein, 59 aa, Homo sapiens
LEEERKALAGDIKDIFSEAKSAGFDVKVIRNIIRIRRQEPAEVEEQETLLDIYRRALGM

SEQ ID NO: 235 - DNA, 374 bp, Homo sapiens
ctagcacgtcgttatggtgaatcggaggaggttattcacgctatcgctgctcatcacgacgagattgatccggtgagtgtcactgacttcatcgtcaaggccgcggatgctatctctgctgctcggcctggggctcgacgtgagtccctcgaagcccacgttcggcggatggacaccatcgaagagatggctaccagctttcccggggtcgtgcgcgcgtttgcgctgcaagcagggcgtgaggtgcagattcttgtcgacccgggcgccgtcgacgatcaccaagcctcgcgccttgcccgccagatcgcccttgcaataggggagcaggtcactgttcccggacggacccgggttactgtgatccgttcgtt

SEQ ID NO: 236 - protein, 124 aa, Homo sapiens
LARRYGESEEVIHAIAAHHDEIDPVSVTDFIVKAADAISAARPGARRESLEAHVRRMDTIEEMATSFPGVVRAFALQAGREVQILVDPGAVDDHQASRLARQIALAIGEQVTVPGRTRVTVIRS

SEQ ID NO: 237 - DNA, 426 bp, Homo sapiens
  misc_feature (426): wherein any n is one of a or t or g or c
gaattcatgttatcttcatagctaaacaccaggccagtacagacactgccctgacctaggcctcacgtggcagttgctcaccaatgggtagttctcaacagatgttgatttactctgttgtgaacattctaggagggtttggtgtgcatgtaacaaaaaaagaagaggaaggagaaggaggaggaataggagaagctgctgtttcccaaattatctctatttcatttagtttatgcacttagaaaacaagcaataatacaggaggggttcagatcttaacacacaaaaaaaaaccacatatgcacaaaatgaagctcactaaattttcatttaagaagaaaaactctttttagtgagcatagacagtgaatctgctgtgtatgatttattgaagttacactccagttgtagttaattgacctgatn

SEQ ID NO: 238 - protein, 52 aa, Homo sapiens [sequence omitted]

SEQ ID NO: 239 - DNA, 300 bp, Homo sapiens
gccgcccgggaaggatggcgccacgtgtctgatctgttggcgcacgaggccctcgacttctacctccttgacgagttcacctacccaatggactgggggtggctcgacgtcgatgaagtcgtcgagactttggtcaaccgcccgggaactcagcacgtcgtcatcaccggacgccgagcaccggatgcgcttgtcgaggtggccgatatcgtcaccgagatgacgaagatcaaacacccgtttgacgttggccagcgcggccaggcgggaatcgagtggtgatgcgccttccacgaattc

SEQ ID NO: 240 - protein, 93 aa, Homo sapiens
AAREGWRHVSDLLAHEALDFYLLDEFTYPMDWGWLDVDEVVETLVNRPGTQHVVITGRRAPDALVEVADIVTEMTKIKHPFDVGQRGQAGIEW

SEQ ID NO: 241 - DNA, 345 bp, Homo sapiens
  misc_feature (1): wherein any n is one of a or t or g or c
nagatctgatcagcgaaggacgcgacgcggtcgagcggccggcgttttgtgcatccaatagcgcaaacgcgcatcaacgggaggatcgaattgatgaccgacaccctgtcctgagtcgaggcgtgccgcgtcgacgacgtcgacgaggaggacgcgatccgtttcgatcatgcgggccgcacctttgcgatctaccgctcgccggagggcgatttctttgccaccgacggtctgtgcacgcacgagaagatccatctcgccgatgggctggtggtcgatcacacgatcgagtgccccaagcataacggccgcttcgactatcgcagcgggctggcgaagggcgcg

SEQ ID NO: 242 - protein, 77 aa, Homo sapiens
VEACRVDDVDEEDAIRFDHAGRTFAIYRSPEGDFFATDGLCTHEKIHLADGLVVDHTIECPKHNGRFDYRSGLAKGA

SEQ ID NO: 243 - DNA, 300 bp, Homo sapiens
agatctttatacttcatgttctttgggactaggatgagacaccatcaaaagacactttttaaagtgtttaacatacaaattattagaaaaataaaatgagcatggaaataaatttagaaaaagatcagaaacaatcaaaaatataaaagagaaaaaataaaaatcacaatgtatgatggtagagataaatctaaatggatcaaaaagcataactgtataaatattaagctctgtaaataaatggagagacagcctgggagataaaacgttaagacgtcatggctgggcacggtggcgcgc

SEQ ID NO: 244 - protein, 67 aa, Homo sapiens
MLFDPFRFISTIIHCDFYFFSFIFLIVSDLFLNLFPCSFYFSNNLYVKHFKKCLLMVSHPSPKEHEV

SEQ ID NO: 245 - DNA, 358 bp, Homo sapiens
  misc_feature (1)..(2): wherein any n is one of a or t or g or c
nnacgcgtgaccccctctcagatcctcgacattctgtctgccggcctgattttcgttgcgctgcttgtgctcgtcattcggcccgcttcggtgctgttggggttggtcggcaccgagacgacccgtcaagaacgcaccctgatgtcgttcatggccccgcgaggaatcgtggcggcgtcggtggcgtcgatttttgccatgcagttcagtgagtccgccgaccacgtgcgggagcaggcgaagcagatcgccgcatctgatccggaacattccaagcggttgttctcctttgctaaccagatcgctggtatggccagccaagtcgaccgactcgtaccgctggtcttcctcgtgatca

SEQ ID NO: 246 - protein, 119 aa, Homo sapiens
  VARIANT (1): wherein Xaa may be any one of Arg or Gln or Leu or Pro or Ser or Ile or Thr or Lys or Ala or Val or Glu or Gly
XRVTPSQILDILSAGLIFVALLVLVIRPASVLLGLVGTETTRQERTLMSFMAPRGIVAASVASIFAMQFSESADHVREQAKQIAASDPEHSKRLFSFANQIAGMASQVDRLVPLVFLVI

SEQ ID NO: 247 - DNA, 210 bp, Homo sapiens
  misc_feature (1)..(2): wherein any n is one of a or t or g or c
nntccggaggccagtgtgggcatcctcatgcaggagccgcagttggatgagtcgaagaccgtccgtgaaaacgttgaagacggtcttggcgacgttatgcaaaaccttaagcggtataacgaaattgccgagaagatggccactgattactccgatgagttaatggaggaaatgggcgtcctgcaggagaagcttgatcatgccgacgcg

SEQ ID NO: 248 - protein, 70 aa, Homo sapiens
  VARIANT (1): wherein Xaa may be any one of Phe or Ser or Tyr or Cys or Leu or Pro of His or Arg or Ile or Thr or Asn or Val or Ala or Asp or Gly
XPEASVGILMQEPQLDESKTVRENVEDGLGDVMQNLKRYNEIAEKMATDYSDELMEEMGVLQEKLDHADA

SEQ ID NO: 249 - DNA, 264 bp, Homo sapiens
  misc_feature (1)..(2): wherein any n is one of a or t or g or c
nnttcgctaatcagatctcacctcgctcaccacgacaccaacttttccgacctgaccatatagattaaggaccacgtcatgacaatgaattctcaatccccgatcacatcagcacagcatgcccccattactccacccaatccgcaggatatggagcgtgttgtcacgacagcgctggaagaagacctacggcttgggccagatgtcactacaatcgctacagtccccgccgacgcccaggctgttgcgcatgtccgcacgcgt

SEQ ID NO: 250 - protein, 62 aa, Homo sapiens
MTMNSQSPITSAQHAPITPPNPQDMERVVTTALEEDLRLGPDVTTIATVPADAQAVAHVRTR

SEQ ID NO: 251 - DNA, 325 bp, Homo sapiens
  misc_feature (1)..(303): wherein any n is one of a or t or g or c
ngccgctgctatgtgaaccacgggtgtctgcccacgcgtgctaagagcccatcanggcagaaacgggggctaaaaattccccaccccttgctctgctccttgcccacattctgcaacataatattacgatagattgctagtaatagacacacacacatgccaccacacatctgagatgcaaactctctaaatgtcgaggtctcttaagacttagaagcttcacaggtcactacagccaactgcccttcatttgcttctagttgcccactcacttggggtctcattgattgtaggatagcagangctgagcaagtagccactgcac

SEQ ID NO: 252 - protein, 53 aa, Homo sapiens
  VARIANT (39): wherein Xaa may be any one of Arg or His or Leu or Pro
MCGGMCVCLLLAIYRNIMLQNVGKEQSKGWGIFSPRFCXDGLLARVGRHPWFT

SEQ ID NO: 253 - DNA, 433 bp, Homo sapiens
gggcccatataatgcacggtaagaaactggtggaagagaatgggagagaattgggagaattaaaatatccacactcccctcctctctcaagacactgcagacaccatgaattgctcaagctttccactggagataaacagctcagtgccccactccagttgccagctattcattgcaattataagtaggagagatagtaggttgagagaaggctggtgcagtttgtccaaatcctgccttttgtaatacggatgaggcagaacagttgttcctaaagagcctgaagtagcagagaacactgcagatgaacacagttgtcttcttggcagacagcaagcctcctaaagttcatagtgcaaaggcacatcaggggtcctgccactacacacatttcactagactgctaaagcaagagccacgtgcctacgccaca

SEQ ID NO: 254 - protein, 58 aa, Homo sapiens [sequence omitted]

SEQ ID NO: 255 - DNA, 413 bp, Homo sapiens
agatctgctgcctgaggcagaaagggctgcttgggtgcctctgtccccagtgccccttcatttctgtcttcctacatcctcttgagattacatgttgattacattatattctattgtatcgtactacataatacagcaacactgaaagaatgaaaggaaacgggaaagggagtgaattggcctttgcaccctgaggataggaagagggtggtggatactgggacagcctggtggacccagccctcccagggttattagatgacatttgtcacgtaccattcctggcagcagcggcaggtcagggtgaccatgatcacctaggaatgcatgtacttctgacagtcatgaaaccaacgcatgagagcaagagatagttgtggggtctggtatccaaaaattgctgcatggatatt

SEQ ID NO: 256 - protein, 53 aa, Homo sapiens
MSSNNPGRAGSTRLSQYPPPSSYPQGAKANSLPFPFPFILSVLLYYVVRYNRI

SEQ ID NO: 257 - DNA, 333 bp, Homo sapiens
  misc_feature (1): wherein any n is one of a or t or g or c
ngcgtcctgggtggtcggaacatggatggcttcttggccatgatcgaaggcattgtccgaaaaaacggattgcccgacgctgaggtccatcaaaggtcggcccaactcacgctgccaggctactaccgcccgacgaaactatgggatgtgctggtctttgatggcaagaagcttgttgccgctgttgagctgaaaagccatgtgggtccgtcctttggcaacaacttcaacaatcgtgccgaagaagccatcggaaccgcgcatgatcttgcgactgcgatccgcgagggcattctcggcgaccagcttcctccttttactggttggctgatc

SEQ ID NO: 258 - protein, 111 aa, Homo sapiens
  VARIANT (1): wherein Xaa may be any one of Arg or Gly or Trp
XVLGGRNMDGFLAMIEGIVRKNGLPDAEVHQRSAQLTLPGYYRPTKLWDVLVFDGKKLVAAVELKSHVGPSFGNNFNNRAEEAIGTAHDLATAIREGILGDQLPPFTGWLI

SEQ ID NO: 259 - DNA, 378 bp, Homo sapiens
  misc_feature (1): wherein any n is one of a or t or g or c
ncgctccacctagcctgtctctcacttcaccagtcctctcagaagaccttcctgtggccttctgggagaagcagccaattggcttagctctgcaaatagcccaagagtatgtctttgttgacaaaatataccaaaccaacacaatcataatgcttttctttttctttggcacctcagttcattatgacggtattcccactacaccaagtacaagttatagactaatcctcactgttctggagggagctgagtttcaagagacttcattacaggttagaaacaagaggcattgctgccctggaattgttcacaggttaaataagataccatgagactcagacccgagggtaggcaatagcataggagtgagtgtgtaca

SEQ ID NO: 260 - protein, 60 aa, Homo sapiens
MLFFFFGTSVHYDGIPTTPSTSYRLILTVLEGAEFQETSLQVRNKRHCCPGIVHRLNKIP

SEQ ID NO: 261 - DNA, 370 bp, Homo sapiens
tccggattcgcaccgaattcctccccgcgagtccccttgattgtgtcacacaggcttcggctcccccaccccgcgttggcccggatccgggggccagcttgcgcactagcctaggcttcacccatgacccacgatcctgatacctctctcctcggacgtacccccagcctggccgaggagcatttcgcccacgacggacttatcgccaagcacgcggtacgagctgtcgcgctggcagccctgcggcccatgcctggtcaactgctgtgggacctcgggaccggagccgggtcgatcgcggtggaatggtgccgcaccgacccgacctgtcgggcgatcgggctagaacgcaaggttgagcgggccgcca

SEQ ID NO: 262 - protein, 82 aa, Homo sapiens
MTHDPDTSLLGRTPSLAEEHFAHDGLIAKHAVRAVALAALRPMPGQLLWDLGTGAGSIAVEWCRTDPTCRAIGLERKVERAA

SEQ ID NO: 263 - DNA, 351 bp, Homo sapiens
gcgcgcccgaccccatcgcggctcttcggcgtcgggtgcagcgcgtgtccccagagctggaactgttcggaggcgcgcaggctgtcggcggacaggcctgtcggcatgtcggacaggcgcacatgacgaaggaacagcgcggtgatgtcgcggctgttggcgatctgtccgagcaattcctcgaggtcgtccgcccccgcatcaccgcgcaggggcggcagcagcacgcgggcgagggctgcgaggtcgaggagttcccacggcgcccccggagcaggacgatggaagggaggggttgcgaaatggcaccgtcccagacggctcgcctgggcgatgccgatcaccacgcgt

SEQ ID NO: 264 - protein, 76 aa, Homo sapiens
MTKEQRGDVAAVGDLSEQFLEVVRPRITAQGRQQHAGEGCEVEEFPRRPRSRTMEGRGCEMAPSQTARLGDADHHA

SEQ ID NO: 265 - DNA, 297 bp, Homo sapiens
  misc_feature (1): wherein any n is one of a or t or g or c
ngcgcgccgaccgagggcaatgcgcatccgcacggtaccgcccgggtctcgatcgtccataacggcatcatcgagaaccatgccgagctgcgtgccgagctagaagcggaaggccaggtgttctccaccgagaccgataccgagaccgttgcccagctggtcgacctgcatctcgcccggggcatgacgccgcgggaggccgcccttgccgcgttccgccggctggagggcgcctatgcgctggcgatggtgttcgccggccatcccgacctgatgatcggcgcccagcacggcgcg

SEQ ID NO: 266 - protein, 99 aa, Homo sapiens
  VARIANT (1): wherein Xaa may be any one of Cys or Arg or Ser or Gly
XAPTEGNAHPHGTARVSIVHNGIIENHAELRAELEAEGQVFSTETDTETVAQLVDLHLARGMTPREAALAAFRRLEGAYALAMVFAGHPDLMIGAQHGA

SEQ ID NO: 267 - DNA, 325 bp, Homo sapiens
cgcgtcttcccgaatatcgaggtccggatcgacgcggcacccggcgaggatgtcggcgagatccaggtccgcggccgctacgtgttctcgggttactacctcaacgatgaggcgaccgcgcaggcgttcgacgacgactggttccgtaccggcgacaccggattcatgctcgacggcgagctctacgtctgcggacgcatcaaggagatgctgatcgtccacggccgcaactactatgcgacggatatcgaggccatcgtctccgagatccccggcgtcaagccgggccgcgcggtggccttcggtgtgcaggaggacggcgcgc

SEQ ID NO: 268 - protein, 108 aa, Homo sapiens
RVFPNIEVRIDAAPGEDVGEIQVRGRYVFSGYYLNDEATAQAFDDDWFRTGDTGFMLDGELYVCGRIKEMLIVHGRNYYATDIEAIVSEIPGVKPGRAVAFGVQEDGA

SEQ ID NO: 269 - DNA, 192 bp, Homo sapiens
ccggaacttgccgaagaagtagcccaggagttgggtgtcactctcacaaagacaactatgcgcaacttcgccaacggagagatcttcgttcgttatgaagaatctgtgcgtggcaccgacgcattcgtcatccagagtttccctgctccgctgaacgagtggctcgttgagcttctcatcatgattgacgcg

SEQ ID NO: 270 - protein, 64 aa, Homo sapiens
PELAEEVAQELGVTLTKTTMRNFANGEIFVRYEESVRGTDAFVIQSFPAPLNEWLVELLIMIDA

SEQ ID NO: 271 - DNA, 448 bp, Homo sapiens
  misc_feature (1)..(2): wherein any n is one of a or t or g or c
nntccggagggcgacattgaggcgcgcgaggcgtggcgtgctgcgggtatccctgacgagcagattcagggtcgctcccttaaggacaactactggcatatgggggttcccggccccggcggcccgtgctcggaaatctacatcgatcgtggcccagcctatggtcccgacggtggtccagaagcagatgaggaccgttaccttgagatctggaacctcgtattcgagaccgaggatctctcagcggtgcgcgctaaagatgacttcgacatcgcaggcccattgcgcagccttaacatcgacactggtgccggtctcgaacgtattgcctatctgctccagggcgtcgacaatatgtacgagactgaccaggtattccctgtcattgagaaagcttccgagatgtcgggcaagcggtacggtgctcgcccagacgacgacgtccgac

SEQ ID NO: 272 - protein, 149 aa, Homo sapiens
  VARIANT (1): wherein Xaa may be any one of Phe or Ser or Tyr or Cys or Leu or Pro or His or Arg or Ile or Thr or Asn or Val or Ala or Asp or Gly
XPEGDIEAREAWRAAGIPDEQIQGRSLKDNYWHMGVPGPGGPCSEIYIDRGPAYGPDGGPEADEDRYLEIWNLVFETEDLSAVRAKDDFDIAGPLRSLNIDTGAGLERIAYLLQGVDNMYETDQVFPVIEKASEMSGKRYGARPDDDVR

SEQ ID NO: 273 - DNA, 324 bp, Homo sapiens
aaatttcaggagctcagttaggaaagggcttcctgagtaagacaggaagagaaaaggcaggtggaacagagaacgctggagctcaacacgttggctcatcaaaagccaccagcactgacacaaaggcgtgagcacagatggagaccataatccaggctcagtcaacatgcaacggtacccggaacagacagggatgcgtccacaccacaaaggctaaaaaagatgattaaatggaagaaaaggccggaggagattcccagaggtggaaacctgagggctaagaacacacggagatgctcaaacccaccaggtaggaagccgcgg

SEQ ID NO: 274 - protein, 56 aa, Homo sapiens
MLTEPGLWSPSVLTPLCQCWWLLMSQRVELQRSLFHLPFLFLSYSGSPFLTELLKF

SEQ ID NO: 275 - DNA, 397 bp, Homo sapiens
  misc_feature (1): wherein any n is one of a or t or g or c
ncatctctgcctcctccttgtcctctccctcccccttgtcctcctcgtcttccttttcttcctcctcttctgtcccagggcttcaaactctggctctctaacgacatggaagagttaaaaggaggaacgctggctcagccaagccccggagactcctacttgatatgggcagtttaaagccactttccctttaaatttttctgtgacaactcttttcatggagaatgaaaagactctcgttaagtgttgccattcagaagtgttggcggtcgttgctaacatgagatccaacaagaaatggtgaaaatgcacaatgcctcaggacaccttgaggaaggagcagcgtgttgctgccgagggtgaacacacgtggtctctgcggagaggcgacagatct

SEQ ID NO: 276 - protein, 55 aa, Homo sapiens
MLATTANTSEWQHLTRVFSFSMKRVVTEKFKGKVALNCPYQVGVSGAWLSQRSSF

SEQ ID NO: 277 - DNA, 435 bp, Homo sapiens
  misc_feature (1)..(435): wherein any n is one of a or t or g or c
ngtcttccttgtcttcctgattgatacggtcagtcccggcgacaaacgctccgatttcccgctcaaggtgctcaatcaccgcgctatgatgttcggtgtagaacatctccatcagttttgcgtccatcaacgccgcctgtacggcacccactgccaggccgcggtaagcatacagcggtcgggacaggcaggggttcgcgcggtgagagagcttgtagtacgcctcaaactcggcgggatcaatgacaaagtcggtcacaaacttggtccgtcctcggtgtttggtttgttcctgaatactcatcgttggctcctatcgacatactcaccaccggcgaagaccatcaaccaaaggatcaggcaccaggtcatcccacgtgtagtaatgtccgcagatgcggatgcgcagtaggttagggttgatttgggtgatgn

SEQ ID NO: 278 - protein, 108 aa, Homo sapiens
MMFGVEHLHQFCVHQRRLYGTHCQAAVSIQRSGQAGVRAVRELVVRLKLGGINDKVGHKLGPSSVFGLFLNTHRWLLSTYSPPAKTINQRIRHQVIPRVVMSADADAQ

SEQ ID NO: 279 - DNA, 314 bp, Homo sapiens
tcgacgcccgtgtacccgcaaccagaaagcaggtcaccggggacaacaacctgctgtcaaccagcagatgcgcacaggagatcgccgcgacggcgctcgcgaacacccacggcaacgtgcgacggagcaccagcaccgccgccatcaccgccgaccaaagccagtccggctgccccgacacgcccagtcccaggcacacgaggacagcggcgacggcagacgccgcgtccacctgccatcgagcacgcgacacactcaccatgctcgcagtttaccctcggcgcccctcccccgacgacatccacccagaattc

SEQ ID NO: 280 - protein, 104 aa, Homo sapiens
STPVYPQPESRSPGTTTCCQPADAHRRSPRRRSRTPTATCDGAPAPPPSPPTKASPAAPTRPVPGTRGQRRRQTPRPPAIEHATHSPCSQFTLGAPPPTTSTQN

SEQ ID NO: 281 - DNA, 395 bp, Homo sapiens
  misc_feature (1)..(67): wherein any n is one of a or t or g or c
nngaattccggtgcgctgatcatcggtctgctggtcgccgccatcggggcctgcgccggttcctcgnaggcctgggcgatcaacccggcgcgcgatctccggcccccgggggttcgcttcttcgccggctggggcgagagcgcacttcctggcaagcagaactacttctgggtgccgatcgtcgctccgctgatcggcggcccgatcggcggcgcgatctacagcttcgccatccgtccctttctgcccaagcgcgcccatgccggcatgccgcagcgcatctcgcccgacgcggtggttcccaccgtcgatcaggtcgcctgagcccgtctgcaacgaggaccattcgttatgagcacgaagaaatacattctcgcgatcgaccagggcacgac

SEQ ID NO: 282 - protein, 107 aa, Homo sapiens
  VARIANT (1): wherein Xaa may be any one of Leu or Ser or Trp or Pro or Gln or Arg or Met or Thr or Lys or Val or Ala or Glu or Gly
  VARIANT (23): wherein Xaa may be any one of Glu or Gln or Lys
XNSGALIIGLLVAAIGACAGSSXAWAINPARDLRPPGVRFFAGWGESALPGKQNYFWVPIVAPLIGGPIGGAIYSFAIRPFLPKRAHAGMPQRISPDAVVPTVDQVA

SEQ ID NO: 283 - DNA, 291 bp, Homo sapiens
caattgcaatactgtgccctgaacttggagaaggaagctggacagaaacgaatgaataaaaccagaagtcacttcaacttccacataagcatctctgtgtttctgtggaattatttctcaactcccagagacacttttggaaagaaaaaaaaaactacaatcaatactattacccaggacaccatctcctacaaagaaccgactgacacacaggggacacactggggacatagtctcacatgtgtgaggttctaaatccaatcccagtatgagacacacaaacactgtaca

SEQ ID NO: 284 - protein, 67 aa, Homo sapiens
MNKTRSHFNFHISISVFLWNYFSTPRDTFGKKKKTTINTITQDTISYKEPTDTQGTHWGHSLTCVRF

SEQ ID NO: 285 - DNA, 430 bp, Homo sapiens
  misc_feature (1): wherein any n is one of a or t or g or c
ntgatcaccgatcggatggttgtcgtcgtggaagcgaagctggtgaaggacaccatctgggcaccggccggtcacgttgtagcccggacatcagctctgctggttcccgccgggcccccgctctatcttccggcatcgtcacagtcgcatcgtgacggtactggctggagtctcggaccagcacactttgaccgtcgtggtcgcctcgtgacatggggtaacgcgaacctcgtcgctcctgttcttgacctcttccgtgcccccattgacaacgatcgggcaagttcactggcccgcaacactatcggtgacgcagcactcgcagctggtctcgaccggctcgtccacaccacaacgtcggtgcgcgacgagggcgatgagttagtcgtcgttactcgcagcgctgctgccgccgcacgcaattccatga

SEQ ID NO: 286 - protein, 143 aa, Homo sapiens
  VARIANT (1): wherein Xaa may be any one of Leu or Met or Val
XITDRMVVVVEAKLVKDTIWAPAGHVVARTSALLVPAGPPLYLPASSQSHRDGTGWSLGPAHFDRRGRLVTWGNANLVAPVLDLFRAPIDNDRASSLARNTIGDAALAAGLDRLVHTTTSVRDEGDELVVVTRSAAAAARNSM

SEQ ID NO: 287 - DNA, 455 bp, Homo sapiens
  misc_feature (1): wherein any n is one of a or t or g or c
ngcgcgccgaaatgcaagggagcggacgttccggcgcgacgtgagggcgagacggtgcgaaaccgggacattccagaggctgtgtcgcacaagacgagacaactccaaggaatgaaactctctggcggtatgttttttttcgaaccgtcgtctgccggtggacaactgccgatgtgtcacgcaccatcttcgcggtgacgtcgtttgccgtcgcatctctcgactggagacgaggatcgcagggtcggcaggacggcgccttcgttcgcttgaggaatcatgatgcgcctgaatgagatcggccagcagcttcgggcctttcgcctcgagtccggcctccgggccgaagagatcgccgcccgcctcggcgtctcccgcgccgccctctaccgttacgagaagggcgaagtcatcaagctcgacacggtgcagcgcctcgccgagctgctcaagat

SEQ ID NO: 288 - protein, 58 aa, Homo sapiens
MMRLNEIGQQLRAFRLESGLRAEEIAARLGVSRAALYRYEKGEVIKLDTVQRLAELLK

SEQ ID NO: 289 - DNA, 493 bp, Homo sapiens
  misc_feature (1): wherein any n is one of a or t or g or c
ntcgcgacccctggaaccagaagacgaccggtctgaacacctccgccgactggcgcctgtccaggtcgaacaccctgtccttcggctggtggtacgcctacacggtgcatgaggaactgtcggacttccgccccgtcacctcggacggcaacgactatctcggctacagctcgcaggtgatccgcgtcggcggcaagatcctctccggctacgacctcaacttcatgcagcaggtcaacacgctgttcatcgccgacacccagcgcctgctcaacgacaggctcaccctcagcgcgggcttccgcgccgccatggtctcgcgccagggcaccaacctgatccccggcgccgatccctacaagatgcagggcaactacttcgagccgctgccgcagttctcggccagctaccagatcaccccgcacgatcaggtgttcgtcaacgccaccacctcattccgtgcgccggaatccgtcgaggcctactcgcagat

SEQ ID NO: 290 - protein, 52 aa, Homo sapiens
SASAARSSPATTSTSCSRSTRCSSPTPSACSTTGSPSARASAPPWSRARAPT

SEQ ID NO: 291 - DNA, 314 bp, Homo sapiens
acgcgtcacggtcccgaatctcgtcgagccaaccgtcgaagaagtgggggacgcggtcctggcaatcaagcccacatacgcctccctcaccactccgacgcataccttcgtcgtcgccatgacagcagccgtatgcggggccgcatcggtctgcgcgccaccatgggcatggggcgtgtggtggatctggccgggatcggtgaccactctggtcatcgtcgattatgcgacgaccttcctaccactgaagttatgggcgtcgctgcgtcgccgagggctggggtagcgctcctgggcggaatcgtcctgacgtg

SEQ ID NO: 292 - protein, 72 aa, Homo sapiens
MTRVVTDPGQIHHTPHAHGGAQTDAAPHTAAVMATTKVCVGVVREAYVGLIARTASPTSSTVGSTRFGTVTR

SEQ ID NO: 293 - DNA, 283 bp, Homo sapiens
  misc_feature (283): wherein any n is one of a or t or g or c
gcgttccatcgccatgatgattcgccgctggatcccacctgtgactgctacacctgccagaacttctcgcgtgcttatctgcaccatctggacaagtgcggggaaatgctgggtagcatgttgaataccatccacaatttgcgtcactaccaagtcctgatggctggtttgcgtgaggctattcaacagggtacattggccgccttcgtcgatgccttctatgccaagcgcgggctccctgtgccgcccttggactgagttttccgaccctaagattcactan

SEQ ID NO: 294 - protein, 85 aa, Homo sapiens
AFHRHDDSPLDPTCDCYTCQNFSRAYLHHLDKCGEMLGSMLNTIHNLRHYQVLMAGLREAIQQGTLAAFVDAFYAKRGLPVPPLD

SEQ ID NO: 295 - DNA, 282 bp, Homo sapiens
acgcgttcctgacgctcgcgatacagtgcatggcgcgccggtgcgtcgcggatcgcctgccacagcagggccggatcatcgaccacgtcgcccagatgccagtgcgcgtagttcgggtcgtcggtccaggcgacgcgggcggcgttgaggaacacgcagggccgcggtcgggtcaggaactcgtagacctggctgctgacgtcgccgacatagatgtcggccgcctcggtgtagctcatgtcgagcaggcgctcggagccgacatcgacgaggatgtggcct

SEQ ID NO: 296 - protein, 84 aa, Homo sapiens
MARRCVADRLPQQGRIIDHVAQMPVRVVRVVGPGDAGGVEEHAGPRSGQELVDLAADVADIDVGRLGVAHVEQALGADIDEDVA

SEQ ID NO: 297 - DNA, 354 bp, Homo sapiens
  misc_feature (112): wherein any n is one of a or t or g or c
taggtcagtgagcccggggcaacagctgcggcggcattggtggttgaagccgtagcgacgttctttttggtgttcatcatcatgcgcgtcaccggccccctggttcggcaancggggttcgcgcccatcgcgatcggcctggcgctgaccctcattcacctggtgaccatgccggtcaccaatacctcggtcaacccggcccgcagcacggggccggcgttatttgccgggggggagtacgtgatgcaactgtggctgttctgggtggcgccgacagtgggcgcggtgatcggcgccatcgttgcgcgaggggtcacctgcccaagggaggcgtgagcctaccagctcacgcgt

SEQ ID NO: 298 - protein, 110 aa, Homo sapiens
  VARIANT (37): wherein Xaa may be any one of Ser or Pro or Thr or Ala
VSEPGATAAAALVVEAVATFFLVFIIMRVTGPLVRQXGFAPIAIGLALTLIHLVTMPVTNTSVNPARSTGPALFAGGEYVMQLWLFWVAPTVGAVIGAIVARGVTCPREA

SEQ ID NO: 299 - DNA, 371 bp, Homo sapiens
gcgcgcccgcgcggacggccgcgcggtttcgaccgcgaccgtgccctggcggaggcgacgcaggtgttctgggcgcagggctacgagggcgcgtcgatcaccgtgctgaccgcggcgatggggatcaccgcgcagagcctctacgccgcgttcgggtccaaggccgagctctacgaggaggcactgggctggtaccggcacaaggtggcggcggccttcgtcgagtcgctcgagcgcgaggccgacgtcctgcgcgggctgatcggcctgctggagaaccttgcgggcgcctattgctgcccggacaagccgcatggctgcatgatctcgacggccttgctcacgtgctccgacgagcatgcggcgctggc

SEQ ID NO: 300 - protein, 102 aa, Homo sapiens
VFWAQGYEGASITVLTAAMGITAQSLYAAFGSKAELYEEALGWYRHKVAAAFVESLEREADVLRGLIGLLENLAGAYCCPDKPHGCMISTALLTCSDEHAAL

SEQ ID NO: 301 - DNA, 303 bp, Homo sapiens
acgcgtgaaggtcaacgtctgttaaaaatctcttttcgcattatatctactcctttcccgagaaacaggattaattcgcccatgattcgcgacaccatcaagagcgcccaagtggagtccatgaaggccggcgacaaggatcgcctggctgccgtgcgcctgatcctggccaagctcaaggatcgcgacatcgaactgcgcactgccagcagcgtgcccgacgacgacaccgtcgtcgtggaagtgttgcagaagatggtgaagcagcgtcgcgaatcgatcgacatgttcaagagcggtggc

SEQ ID NO: 302 - protein, 101 aa, Homo sapiens
TREGQRLLKISFRIISTPFPRNRINSPMIRDTIKSAQVESMKAGDKDRLAAVRLILAKLKDRDIELRTASSVPDDDTVVVEVLQKMVKQRRESIDMFKSGG

SEQ ID NO: 303 - DNA, 246 bp, Homo sapiens
  misc_feature (1)..(2): wherein any n is one of a or t or g or c
nncggccgcggcaatgcggcggtgagcttcgatgtcgcaccgaccgccgatgtcgaccgcgccgccgacatcctggccgccatcgcgctggagatgcgcaccgaggacgcgttccgggacggcatgctgtcggacctcaactactggggcgtcaatgcggtcagtggcaccgccgtcaacctcgcaggccagatcgtgtgcaccgactccgcccgctgggcggtgcagcgcgagttcaaccgacgc

SEQ ID NO: 304 - protein, 82 aa, Homo sapiens
  VARIANT (1): wherein Xaa may be any one of Phe or Ser or Tyr or Cys or Leu or Pro or His or Arg or Ile or Thr or Asn or Val or Ala or Asp or Gly
XGRGNAAVSFDVAPTADVDRAADILAAIALEMRTEDAFRDGMLSDLNYWGVNAVSGTAVNLAGQIVCTDSARWAVQREFNRR

SEQ ID NO: 305 - DNA, 319 bp, Homo sapiens
  misc_feature (1)..(319): wherein any n is one of a or t or g or c
ncgggacgctggtccacatcggaactacggcgtacggagaactgcaccgggtaggtgaaaccggttgccttcatgatgaccttggcgtgttcggcgtccacctcgacctttttttgctgcaactgaacaccgtccgtcagcaggcttggcgaggagttcctggcagtggagtggcagccggccaaggccaggacgaggattaggagtgaggtctttttcatgggtaacttccttgaacacaattaaaaatctggctcgggctacgtgggagaaccgcagcccgacgccgttttctatcggctgtaaaacttaaaacgcn

SEQ ID NO: 306 - protein, 73 aa, Homo sapiens
MKKTSLLILVLALAGCHSTARNSSPSLLTDGVQLQQKKVEVDAEHAKVIMKATGFTYPVQFSVRRSSDVDQRP

SEQ ID NO: 307 - DNA, 306 bp, Homo sapiens
  misc_feature (1)..(2): wherein any n is one of a or t or g or c
nnacgcgtgctgggcgatgcgccccgcttcggcatcgaggcggcttccggtttcggctgggagcgctggctcggcaccgggggcgtgtttatcggcatggatgggttcggcgcctccgcccccgcggccgacctctatcgacatttcggcatcacgccggatgctgtggccgattgcgtgcgccgcacgctcggttgaacgtctttttacatcacgaggaaacatcgacatgccggtcaaggtcgccatcaacgggttcggtcgcatcgggcggctggtgctgcgcgggatcgtcgagagcggccg

SEQ ID NO: 308 - protein, 65 aa, Homo sapiens
  VARIANT (1): wherein Xaa may be any one of Ala or Arg or Glu or Gln or Gly or Ile or Leu or Lys or Pro or Ser or Thr or Val
XRVLGDAPRFGIEAASGFGWERWLGTGGVFIGMDGFGASAPAADLYRHFGITPDAVADCVRRTLG

SEQ ID NO: 309 - DNA, 343 bp, Homo sapiens
  misc_feature (1): wherein any n is one of a or t or g or c
nggcacgcctgtcgacccggagaaccctgcgtcatgaccccgacacccccctggacccgcgccgactggccgatcgccgcagcactgatccagtatcccaacatcctgcccgacggcagttccagtcaggatcagtcacccgacgcctggggccgggtactcgacgacgtcgtcgatgccggcttcaccgaggtcgatccgaccgattcctggctgcgcatcgccgatctgtcgccttcgcggctcgaggacttcatcgccccgctcgacgagcgtcacctcgcggtgcccggcatctcgactgcgcgccgcagcgtcatcgaccgcgtccatggcgacgcgt

SEQ ID NO: 310 - protein, 103 aa, Homo sapiens
MTPTPPWTRADWPIAAALIQYPNILPDGSSSQDQSPDAWGRVLDDVVDAGFTEVDPTDSWLRIADLSPSRLEDFIAPLDERHLAVPGISTARRSVIDRVHGDA

SEQ ID NO: 311 - DNA, 263 bp, Homo sapiens
  misc_feature (121)..(122): wherein any n is one of a or t or g or c
tccaccccgtcgatctatgccgatatcgaccgggtgcgtgcggagaagctcggcctgtctccgacgcagatcttcgacaccatgcagacctatctcggctcgacctatgtcaacgacttcnnattttctcggcgcacctacgaggtgattgcgcgggccgatgccggcttccgccgcgacgtcgatgacatcgcccggctgcgtgcgcgcaacgcgaacggcgacatgatcccgctcggcacggtggcgcgtttcgaacgcgt

SEQ ID NO: 312 - protein, 87 aa, Homo sapiens
  VARIANT (41): wherein Xaa may be any one of Ala or Arg or Glu or Gln or Gly or Ile or Leu or Lys or Pro or Ser or Thr or Val
STPSIYADIDRVRAEKLGLSPTQIFDTMQTYLGSTYVNDFXFSRRTYEVIARADAGFRRDVDDIARLRARNANGDMIPLGTVARFER

SEQ ID NO: 313 - DNA, 306 bp, Homo sapiens
acgcgttccaacctcgtcaaaacggctatcgcaggaaatgaccccaactggggtcgcatcctcgcggcgatcggatgtgttcctgagaatatagctcccttcgatcccgaccaggtggatgtgtccatcaatgacattcagatctgtaaggccgggggtatcggggaggaccgcaacctcgtcgatatgaggccacgagaggttcacatcgatattgagctgcatgcgggtgatgccgaagctgcggtatggactaatgatctgacccaccaatacgtcgaagagaatagcgcgtatacaccatgg

SEQ ID NO: 314 - protein, 102 aa, Homo sapiens
TRSNLVKTAIAGNDPNWGRILAAIGCVPENIAPFDPDQVDVSINDIQICKAGGIGEDRNLVDMRPREVHIDIELHAGDAEAAVWTNDLTHQYVEENSAYTPW

SEQ ID NO: 315 - DNA, 330 bp, Homo sapiens
acgcgtgcaggtaacttccaacgtgtcgccgagttacaatacggtcgcattcctgagctggaggcgcaacttcccaaagaagaagaggcaggaaacgatgctgcacagaagaacatgctccatgaacgtgtaactagcgatgacatcgcagctgtggtcgccaagatgactggtgtgcctgtccgcaacttactacgtggagaacgcgaacgtctgcttggtattgaagactctcttaggcggcgtatcatgggacaggaagaagctctggatgctattggcgaagctgtgcgtcttagtcgtgcaggtctgcattcatctaagcggccg

SEQ ID NO: 316 - protein, 110 aa, Homo sapiens
TRAGNFQRVAELQYGRIPELEAQLPKEEEAGNDAAQKNMLHERVTSDDIAAVVAKMTGVPVRNLLRGERERLLGIEDSLRRRIMGQEEALDAIGEAVRLSRAGLHSSKRP

SEQ ID NO: 317 - DNA, 307 bp, Homo sapiens
  misc_feature (1)..(307): wherein any n is one of a or t or g or c
nngtagacctacccgcgccgcacgcgccactaagatatataggacctagcctataacctaaccccgacaaagctacgaaacggcccccctaatacccccccgaaaaagccaacggaggcccccggggccggcccgaaacnagccccggggggcccgaccccccccccccccgccntagaccctacgtatacgggccccccgaacgcgcggtagggcggggggaaccnatatagcaccccagggcctacggagggcccccctactactaggaccccccgccccgaagcgaaggccccccaaactacgn

SEQ ID NO: 318 - protein, 56 aa, Homo sapiens
  VARIANT (33): wherein Xaa may be any one of Leu or Pro or Gln or Arg
  VARIANT (45): wherein Xaa may be any one of Ile or Leu or Val
DLAYNLTPTKLRNGPPNTPPKKPTEAPGAGPKXAPGGPTPPPPAXDPTYTGPPNAR

SEQ ID NO: 319 - DNA, 364 bp, Homo sapiens
gatctcgacgccgtctacgacattcccgtcaccgtcagtgccgtgctgggcaagaccaccatgcaggtcaaccagctcctcaagctcggccggggcgccgtggttgagctggatcgcaagctcggggaggcgatcgacatctatgtcaacaatcgcctggtggcccgcggcgaagtcgtgatggtcgatgacagccgcctgggcgtcaccatgacggagatcgtcaaggccgaccgggtggtctgagcgagatgagcgagctgctgcgcattctgatcatcggacgcgatgacgtcgaactcgcgcttggaaccggtctcgcggcctccggcagcccgccttatgccgacgccctgcgacgcgt

SEQ ID NO: 320 - protein, 81 aa, Homo sapiens
DLDAVYDIPVTVSAVLGKTTMQVNQLLKLGRGAVVELDRKLGEAIDIYVNNRLVARGEVVMVDDSRLGVTMTEIVKADRVV

SEQ ID NO: 321 - DNA, 403 bp, Homo sapiens
  misc_feature (403): wherein any n is one of a or t or g or c
acgcgtccaccggcccttacaggttgccaagaaagtgcgggtagatcagccacagatccatcaccggcttgaagtccttcagcggcatggccgccagttgatcgcgatgggcactgcgttccagcagcggacgtggcaccaggccaaggcccaggccgtcagccaccaggcccagttgcagctcggtgccaaaggtctccaggttgacccgtagcgccaggccctggtccgacaaggtgcgttgcagcccggcgcggaagccacagccatccgggttgaggatccagccgttctggtacacgtccgccagcttgcagggcttcttgggcagttgggccttggcgcagaccaccaccagttccatcttgccgatggactcgccgacgatgttatccgggaagan

SEQ ID NO: 322 - protein, 115 aa, Homo sapiens
MELVVVCAKAQLPKKPCKLADVYQNGWILNPDGCGFRAGLQRTLSDQGLALRVNLETFGTELQLGLVADGLGLGLVPRPLLERSAHRDQLAAMPLKDFKPVMDLWLIYPHFLGNL

SEQ ID NO: 323 - DNA, 344 bp, Homo sapiens
cggccgtgttcaatgccgctaacgagtcctgtgtcgacgccttctgtgccggaagtatcggtttcctcgacattaccgacacctttgccgcggtccttgacgagcacctatccggtgacgagaacgacacccttggtgctcgacatgtcggtgacgaggccctcaccctcgatgccgtgttggccgccgacgcctggggtcgtcgtcgcgccgccgaggtgtgtgcccgggggattcgccggtgatagttgtagtcgaagtgctggctggaatcgtcttcttcggcctcatcatcctctcggtgctacttcatgagtgcggtcacttcatcccggcgaagatct

SEQ ID NO: 324 - protein, 104 aa, Homo sapiens
RPCSMPLTSPVSTPSVPEVSVSSTLPTPLPRSLTSTYPVTRTTPLVLDMSVTRPSPSMPCWPPTPGVVVAPPRCVPGGFAGDSCSRSAGWNRLLRPHHPLGATS

SEQ ID NO: 325 - DNA, 353 bp, Homo sapiens
  misc_feature (1)..(2): wherein any n is one of a or t or g or c
nnagatctcaccgaatcggccccgggagcgtctttggcacacaagaaacaccatcatgaagccgtgttgttggctagcaaagtcgcagccgcaccgggagtactggcggaactctgcatttccgacgacccccattacacccgcggctacgtttgtgtcgacggggtctacacgacggtgactaacgtcaaagctgacggcgaccccaatggtggacgcatcatcctcgtcgacacggcacgtgccgacccaaccacgatcaccacgtggctcgaaaaccaccccgttcttatcggccctgccacggccagcggccccaaagcggcctcctggcatgatcacctctgcggccg

SEQ ID NO: 326 - protein, 117 aa, Homo sapiens
  VARIANT (1): wherein Xaa may be any one of Leu or Ser or Pro or Arg or Gln or Ile or Thr or Lys or Val or Ala or Glu or Gly
XDLTESAPGASLAHKKHHHEAVLLASKVAAAPGVLAELCISDDPHYTRGYVCVDGVYTTVTNVKADGDPNGGRIILVDTARADPTTITTWLENHPVLIGPATASGPKAASWHDHLCG

SEQ ID NO: 327 - DNA, 397 bp, Homo sapiens
gaattcgggagcctcgacggtttcaccgtctgatggcatgcgatgaatgtaggagatgaggtccaccatattggacccaacaacggcgatatccatgtcactgcacctttcagtcaaaggcctcgccttgagcaagaagcccggtagttacagagaacgtacgggtcgcaccagcatccagatgaatgagggttcccgcagcttcggcagccagtcgcccctccggcctgctggtacctggcagcacgtatgcggccaccctttgatctgcgttgtgaagtatccaccgggtggcgacagggaactggtctgtacggaagcgggtcacgaagttgtgatgaacacgggcctgcattctgaactcagcagtcttgccgtattgcggtaagtcgtctgc

SEQ ID NO: 328 - protein, 110 aa, Homo sapiens
MRSTILDPTTAISMSLHLSVKGLALSKKPGSYRERTGRTSIQMNEGSRSFGSQSPLRPAGTWQHVCGHPLICVVKYPPGGDRELVCTEAGHEVVMNTGLHSELSSLAVLR

SEQ ID NO: 329 - DNA, 386 bp, Homo sapiens
gatctatttgtgggtatgggtactgattttgctaataattcactattcacacatccatctcacatttctcttattgagtgtgaagttcttccaactacatataaacttctacctactttcattacatttgcaagtgcatctcttgcattctatctatatcattatgctactccattccttgtagctacaactaaaacttctcttggatacaatctttataacttcttcaatggaaaatactatattgaagttctttataatacttatgtaattccagcatcacttggtattggatacattgtatctaaacaactagatcgaggtattgttgaaatgctatttggatacggtctagcatcaggtctacgaagttctggtgagaaagt

SEQ ID NO: 330 - protein, 128 aa, Homo sapiens
DLFVGMGTDFANNSLFTHPSHISLIECEVLPTTYKLLPTFITFASASLAFYLYHYATPFLVATTKTSLGYNLYNFFNGKYYIEVLYNTYVIPASLGIGYIVSKQLDRGIVEMLFGYGLASGLRSSGEK

SEQ ID NO: 331 - DNA, 379 bp, Homo sapiens
ggatccacctggctgattgttcttactctcattgtctacggtgttgggctcggcctcgcctcggcccagctgacctcgacggtgttgcacgacattcctgccgaccaatccggggcaggatcggccacccagtcgacggtacgtcagctgggttcggccttcggcgccgccatcgccgggacggcgctgggatcggccatgaaccacaccattcccgacgcggtggcctcgatcagcgcagtaccgaccagagtcctcgacaagctcgttcacatcactgaggactcaaccggttcggccattccaggacttcgccatgcgtctgcccacagccccttcattcgcccgctcggtgaaatccgcgacgccgtcatctgga

SEQ ID NO: 332 - protein, 126 aa, Homo sapiens
GSTWLIVLTLIVYGVGLGLASAQLTSTVLHDIPADQSGAGSATQSTVRQLGSAFGAAIAGTALGSAMNHTIPDAVASISAVPTRVLDKLVHITEDSTGSAIPGLRHASAHSPFIRPLGEIRDAVIW

SEQ ID NO: 333 - DNA, 325 bp, Homo sapiens
  misc_feature (101)..(315): wherein any n is one of a or t or g or c
tgatcagggaggcgcggccgcagggatcgagctgaaccgtgatgtcaccctcactccatgtgatcggtgtgtcagggatgacgggaaggcccgcggcgacnatctcggacgagtcccggacggcgactccgagcccactggatgcccggttgaagctcgtgatgccggtgtcagccgtcagatagccctggcgcaggctgcaccactggtacattctcaattccgtttttggggcaccatccatccggatcgcgacttggcaatcattgaggctgatggtgcatntcactcctccttcgtcatccaggacgaggncattctcgag

SEQ ID NO: 334 - protein, 81 aa, Homo sapiens
  VARIANT (48): wherein Xaa may be any one of Ile or Met
MDGAPKTELRMYQWCSLRQGYLTADTGITSFNRASSGLGVAVRDSSEXVAAGLPVIPDTPITWSEGDITVQLDPCGRASLI

SEQ ID NO: 335 - DNA, 372 bp, Homo sapiens
  misc_feature (1)..(299): wherein any n is one of a or t or g or c
ntccggaacgtgggcggccgaggggtccatacagtccgccgacgacgtcccacgccgcccacctggtggccacgccgaagagagaaacacctgtgacccagtacgacgtgcaccagtccgctccccagcccgggggctacccgaccgggcagccggtctacggccagcccggctaccagccgcagcggacgaacaccatggccatcctcggcctggtcttcgcgttcgtgttcagcccgctcggcgtggtcttcagcgccatcggcctcaagcaggtcaaggagcggcgcgagggcggncgcggactggcgctggccggtctgatcctgtcgatcgtgttcattctgctcgggatcctgctcgcggtgatca

SEQ ID NO: 336 - protein, 75 aa, Homo sapiens
  VARIANT (68): wherein Xaa may be any one of Ala or Asp or Gly or Val
PSTTCTSPLPSPGATRPGSRSTASPATSRSGRTPWPSSAWSSRSCSARSAWSSAPSASSRSRSGARAXADWRWPV

SEQ ID NO: 337 - DNA, 290 bp, Homo sapiens
  misc_feature (1)..(2): wherein any n is one of a or t or g or c
nntaaagcgccgttgtgggggcggagaaaggtgggctcgatcaggtggaagtaccgtctagagaacatcgagccgttcatcgacacgtgggttgcgcaccaggtgcgcgatgactactggaagcacggctcggtgtgcgaggactacagctctttggatgctgcggtcatggcggtgggcggctggtatgacccgtaccgcgacaccgttctgcgtttgaccgagcacctttctgcgctcggcaagaatgttcgcggcatcgtaggtccgtgggcccaccagtatccgga

SEQ ID NO: 338 - protein, 96 aa, Homo sapiens
  VARIANT (1): wherein Xaa may be any one of Phe or Ser or Tyr or Cys or Leu or Pro or His or Arg or Ile or Thr or Asn or Val or Ala or Asp or Gly
XKAPLWGRRKVGSIRWKYRLENIEPFIDTWVAHQVRDDYWKHGSVCEDYSSLDAAVMAVGGWYDPYRDTVLRLTEHLSALGKNVRGIVGPWAHQYP

SEQ ID NO: 339 - DNA, 407 bp, Homo sapiens
tccggatcttcatgttgctggcgatcgtgctgcacatttggtcggcgattcgcgttaacaagcagcgcaacattggaaccggtggcgctggccgttactcggtcaagaagaacctctcgccggagaatacctatgctgcccgcacgatgttctggggtggctggatcatcttcctattcctcatcctccacctgctgcagttcaccattagccctgacttgctcaataacccgcccaccgatgcagctggacgcgcagggatggtacttacggcgttcagccactggtggttcgtgctcattcacctcatcgccatgatcgcggtgtgcatgcacgtctcccacggtttctggagtgcctttgcgaccctcggcgtcaacgtctctggtactctgcatggatattcg

SEQ ID NO: 340 - protein, 132 aa, Homo sapiens
MLLAIVLHIWSAIRVNKQRNIGTGGAGRYSVKKNLSPENTYAARTMFWGGWIIFLFLILHLLQFTISPDLLNNPPTDAAGRAGMVLTAFSHWWFVLIHLIAMIAVCMHVSHGFWSAFATLGVNVSGTLHGYS

SEQ ID NO: 341 - DNA, 338 bp, Homo sapiens
  misc_feature (1)..(3): wherein any n is one of a or t or g or c
ntntacaatgtttgggaacatgaatagtaaacgctgtgagaaggcacaagcccagagctgtggctctgtagttaaaattctgcccaaatgataataccatgtgtacttgtgtatatatacatagataatattttactttataatgcagctttgcattgagaccctgatttcgcttagaccttctttcctaatagatattgccagtgggctcatgtgctatgcttggctagaaggcagctcatttaacaactgctcagccaagcaagggaagctctactgcaggtccaggaggcccccaagccaaaataagcagaaggaggtggggcacattttcgcga

SEQ ID NO: 342 - protein, 65 aa, Homo sapiens
MQLCIETLISLRPSFLIDIASGLMCYAWLEGSSFNNCSAKQGKLYCRSRRPPSQNKQKEVGHIFA

SEQ ID NO: 343 - DNA, 370 bp, Homo sapiens
acatgttaagagaagcaagatttaaagagtttcatggatgacaaagaaaacacaataataccaggtctccagagccaagtagaaaattccagctagtagtaaaaaaataaaaaaatatattgttctaagagctgggcagactgatttcacaggtgtcaggaggtgatgaaaggaaacagactaggagaaaagtctgcaaaattatgacatgtttcatgccacagacacaagataacataggtaggatcaagatagtgctttggctgcagagcaccacctccaaaaggcgcccatgtcagagagagttagagatgggcaccccacaagctctgccgctatgtctcggttcttgtcatacactctctgtaca

SEQ ID NO: 344 - protein, 55 aa, Homo sapiens
MTCFMPQTQDNIGRIKIVLWLQSTTSKRRPCQRELEMGTPQALPLCLGSCHTLSV

SEQ ID NO: 345 - DNA, 401 bp, Homo sapiens
  misc_feature (1): wherein any n is one of a or t or g or c
nacgcgtcctattatcgcctgctgcccgacgacaagcgctactacgtcaatgacaccggcaccggcaacacggtcaatctcagccatccgcgcgtgatccagatggtcaccgacagcctgcgctactgggcggacgagatgcatgtcgacgggttccgcttcgatctcggcaccatcctcgcccgcgagccgaacgggttcgacaaccagtcgggcttcctcaaggcctgctcgcaggatccggtgctcggtaccgtcaagctgatcgccgagccctgggattgcggccccggcggctatcaggtgggcgggtttccgcccggctgggccgaatggaacgacaagttccgcgacgatgtccgcgattactggaagggcgacggctcggctcgctcgctagc

SEQ ID NO: 346 - protein, 133 aa, Homo sapiens
  VARIANT (1): wherein Xaa may be any one of Asn or Asp or His or Tyr
XASYYRLLPDDKRYYVNDTGTGNTVNLSHPRVIQMVTDSLRYWADEMHVDGFRFDLGTILAREPNGFDNQSGFLKACSQDPVLGTVKLIAEPWDCGPGGYQVGGFPPGWAEWNDKFRDDVRDYWKGDGSARSL

SEQ ID NO: 347 - DNA, 347 bp, Homo sapiens
atctggtcggccgcgctgatgatcgagcacctgggcgacgggtatccgcttaatcaggaagcggcggcaaccatcgtgtccgccatcgaaacggtgcttgccgaaggcccgcgcacccgggaaatgggcggcggcgccagcactgtcgaagtgggtcgcgccatcgccgaatgcgtggcagggaacaggagctgaacatgaccaacgcacattacatcgccaaccaatggctggcatcgacctcgctggaagacattccggtgatcgaccccagtaccggcgaaacctattcgagcatcgcccgtggcacagccgccgatatcgaggcggcgatcagcgcggcgcgc

SEQ ID NO: 348 - protein, 64 aa, Homo sapiens
IWSAALMIEHLGDGYPLNQEAAATIVSAIETVLAEGPRTREMGGGASTVEVGRAIAECVAGNRS

SEQ ID NO: 349 - DNA, 363 bp, Homo sapiens
  misc_feature (1): wherein any n is one of a or t or g or c
ntgaaacaggttccaacattttgtataaaatagtggaggaatcaatttatcttgataaataaagttaaaagtataaaaataagttatttttatgcgaacaaaatgtatttttgctactttgaggtaattctcagtcaagtgtgtatatattttagacatatttttcctacaaaatgacatgatagcataatacaacatcatttatttcacatttgactttgcagagttggatcagaaaggtcgaatttgagggctatatggttttcttaagggccctcctttttcttttgtcttctttttttccgttttaaaattaaggtataatttacatatagtataattcagcttttagtgtgtagatct

SEQ ID NO: 350 - protein, 67 aa, Homo sapiens
  VARIANT (67): wherein Xaa may be any one of Gln or His
MMLYYAIMSFCRKNMSKIYTHLTENYLKVAKIHFVRIKITYFYTFNFIYQDKLIPPLFYTKCWNLFX

SEQ ID NO: 351 - DNA, 263 bp, Homo sapiens
ggtaccaatgtaatagcccgcagcgctcttcagtatttggagggggtactcgataccgcactcggcgaatgcaagtttcccgtatgcaaaatccgacacaatgtatggttccggtgttattagctgctgctggtcttcttcagtaaagcgtgaccaaccgccaccattaatggccgcgttcactccttcgccccaagctcgactgagcgcaggaacggttttgaacagctcgggtacgatcggctggccggcgcggtacgcgt

SEQ ID NO: 352 - protein, 54 aa, Homo sapiens
MYGSGVISCCWSSSVKRDQPPPLMAAFTPSPQARLSAGTVLNSSGTIGWPARYA

SEQ ID NO: 353 - DNA, 333 bp, Homo sapiens
cgcgtagctgcatcaactgcccggcaggtcattttccaacggctgcgcgaggccgaggacgagcagaaatacggtcatttttccgcggttgagggtgacgtcatcaccggagtcgtccagcagtcttaccgcgatacccggaccgttcgcgtcgacctgggctcgttggagggcattatgcctccggcggaacaggttcccggggagaaatattcccatgggcgtcgtatccgtgtgtacgtcgtggccgtgcgcaaggaagcccgtggcccgcaggtcattgtctcgcgcactcacccgaacttggtgcgcaagctttttgctatggaggta

SEQ ID NO: 354 - protein, 111 aa, Homo sapiens
RVAASTARQVIFQRLREAEDEQKYGHFSAVEGDVITGVVQQSYRDTRTVRVDLGSLEGIMPPAEQVPGEKYSHGRRIRVYVVAVRKEARGPQVIVSRTHPNLVRKLFAMEV

SEQ ID NO: 355 - DNA, 304 bp, Homo sapiens
  misc_feature (304): wherein any n is one of a or t or g or c
acgcgtgaaggatgcgccccggtcgaccggccatccgtcttgcctcgcaggcatccagcccgccacatgctgcaaaccgcaacaccgctttgccgtcgcatggcatctccactccggatcgcatcgatccacgagggctatcggcgcgaaagaggttgccggggcaaatccggcggaggaatgccgatggagtggaagacgctgctcgacgacacccgcttcggaggggtcgccagcctcgatgggacgcgcggacggtcggagttccagaaggaccacgaccggatcatcttctccgaagccn

SEQ ID NO: 356 - protein, 97 aa, Homo sapiens
MRPGRPAIRLASQASSPPHAANRNTALPSHGISTPDRIDPRGLSARKRLPGQIRRRNADGVEDAARRHPLRRGRQPRWDARTVGVPEGPRPDHLLRS

SEQ ID NO: 357 - DNA, 258 bp, Homo sapiens
  misc_feature (1)..(14): wherein any n is one of a or t or g or c
nncgggaaattaantccccggcccttggaaacacgggcccaggcgcggtatcgtttcttggctcgtaataggctccttgctgctttctcgcagggggtagtggtgacgtccgcagcgtggagatcaggagctcttaatactgccagttgggcacgtgatcttgggtgtccagtgatgtcagtgccgcatagtattcatgacgtggatggagctgggtgtcatcggcttattcgtgagggggccacacttgtgacgcgt

SEQ ID NO: 358 - protein, 86 aa, Homo sapiens
  VARIANT (1): wherein Xaa may be any one of Phe or Ser or Tyr or Cys or Leu or Pro or His or Arg or Ile or Thr or Asn or Val or Ala or Asp or Gly
  VARIANT (5): wherein Xaa may be any one of Asn or Ile or Ser or Thr
XGKLXPRPLETRAQARYRFLARNRLLAAFSQGVVVTSAAWRSGALNTASWARDLGCPVMSVPHSIHDVDGAGCHRLIREGATLVTR

SEQ ID NO: 359 - DNA, 305 bp, Homo sapiens
  misc_feature (25): wherein any n is one of a or t or g or c
cgcggcctcctgctggtcgggattntccttgctgtagttaaccaaaccaccggcgtcaataccgtcatgtattacgcgcccaaggtgttggagttcgcaggaatgagcacccaggcgtcgattatttctcaggtggctaatggagtcatgtctgttattggtgccgctgcaggcttgtggctcatcgaacggtttgatcgtcgtcacctgcttatcttcgatgtcacggcggtcggtgtgtgtctccttggtattgcggctactttcgggctggcaattgctcctcatgtgggtcaaggggtacc

SEQ ID NO: 360 - protein, 101 aa, Homo sapiens
  VARIANT (9): wherein Xaa may be any one of Ile or Leu or Phe or Val
RGLLLVGIXLAVVNQTTGVNTVMYYAPKVLEFAGMSTQASIISQVANGVMSVIGAAAGLWLIERFDRRHLLIFDVTAVGVCLLGIAATFGLAIAPHVGQGV

SEQ ID NO: 361 - DNA, 298 bp, Homo sapiens
  misc_feature (1): wherein any n is one of a or t or g or c
ngcgcgcccgtcaccacgctgcccaccatcgtcgccatcctgctgccgatcggctggctgatcggcggggcagggggggcggcggtcgcgatcgccaccgggctggcgacgacctgcatctacgaattctgccactgcgtgcagcatctcaacttccggccccgttcggcgctgctgcgccggatgaaggagctgcatctcgcgcatcatttccatgacgagcgcagcaattacggcatcacctctttcgtcttcgaccagctgctcggcacctatcgcgcctcccccaagggcgcgc

SEQ ID NO: 362 - protein, 99 aa, Homo sapiens
  VARIANT (1): wherein Xaa may be any one of Cys or Arg or Gly or Ser
XAPVTTLPTIVAILLPIGWLIGGAGGAAVAIATGLATTCIYEFCHCVQHLNFRPRSALLRRMKELHLAHHFHDERSNYGITSFVFDQLLGTYRASPKGA

SEQ ID NO: 363 - DNA, 367 bp, Homo sapiens
acgcgttgccgctaaacgcaattcgcgtgaccagcgcctcaaggggctacaggcggcgcagggcgccggtgaaactaaggaggaaaccgcaccgtgagcgatcccagtgagacgtggcgcgatttgttgtcaccgaccgccatcgcaaccctgcagatggttcacaaggcagaggatgtgcaggccaggttcgtgcaggcgctcgatggcgtgcgtcgcgaagcgttcagcccggaggaagacgtgtggtccgcggcggacggccacggccgcgtccgggcgctgatgatcgatgacgaggtcctgggcgggaagtacgaccttgaagaggtcgaggacgtggtcagcaacgcgatgatcgacgcgt

SEQ ID NO: 364 - protein, 70 aa, Homo sapiens
MVHKAEDVQARFVQALDGVRREAFSPEEDVWSAADGHGRVRALMIDDEVLGGKYDLEEVEDVVSNAMIDA

SEQ ID NO: 365 - DNA, 375 bp, Homo sapiens
  misc_feature (1): wherein any n is one of a or t or g or c
nacgcgtcggcgatcgaactggtgttcaacttgccgacggtcaaagggcggcgaatcgacgttctcgggcggagcgacgagcgctatctgatctccggcggcagcggtgcgttgatcgacgcgatggcggcgcgtctgtcggcccgcattcagctcaaccgccgcgttacgcggatcgatccgttcggggcgggggttcgcttggtgtttgccgatggcaagaccgttgatgccgccaacgtgatcgtgacgacgccggcctcgatcacgcgcaacatcgattttcgcgtgccgttgccgcccttgtggacgcgcttcattgccgaggtagggttgggcgtgaacatgaaggtccaggtcgggatgacggcgcgc

SEQ ID NO: 366 - protein, 125 aa, Homo sapiens
  VARIANT (1): wherein Xaa may be any one of Asn or Asp or His or Tyr
XASAIELVFNLPTVKGRRIDVLGRSDERYLISGGSGALIDAMAARLSARIQLNRRVTRIDPFGAGVRLVFADGKTVDAANVIVTTPASITRNIDFRVPLPPLWTRFIAEVGLGVNMKVQVGMTAR

SEQ ID NO: 367 - DNA, 325 bp, Homo sapiens
gcgcgccgtcccttgaaccggctgagcgaggccgaaccgaccagatcgtcgccgacgaagccgagaatgaggcgatcgtcccgagtgaaacgctgcagacgctggactgcttcatcgatgccggtgaacgggagccctgaagtaccccaacgcacaccgggcaggttcatcagtgccgaccatcccggcgcatcctgcgggcccgccgcacgcaatgtcagaccagtcggcggtaccgacatcgcgtgtctatgcgccggcgtttactggaaggggaggtagcggagcgacagcagcacaacactgatgtcgctcttcggcgcgc

SEQ ID NO: 368 - protein, 80 aa, Homo sapiens
MSVPPTGLTLRAAGPQDAPGWSALMNLPGVRWGTSGLPFTGIDEAVQRLQRFTRDDRLILGFVGDDLVGSASLSRFKGRR

SEQ ID NO: 369 - DNA, 397 bp, Homo sapiens
gccaggcatcccaaaccgttgaaagtcctcgcggccatcgacttgtcgcaccttgaagaactgacatacgggctgaacgagcgcgtccttaaactggcgtcgacattggcactggcttgcgacgcgcaactgcacctgctcaatgtcagcaactggtcggtggtgggcgatacccacgtgagtgtgccgacccagagcctggagagtagtttgggcgaggcggtcaacgacgcgcaggcggaggccttcgacgcactcgccgaacgctatggcgtcgagcagaaacaccaacatgtgctgaccgggattccgcacaaagtgatcagcttgttcgcgcggcgcaacgccttcgacgtggtggtgcttggcacggtctatcgcgacaggcttgaccggt

SEQ ID NO: 370 - protein, 132 aa, Homo sapiens
ARHPKPLKVLAAIDLSHLEELTYGLNERVLKLASTLALACDAQLHLLNVSNWSVVGDTHVSVPTQSLESSLGEAVNDAQAEAFDALAERYGVEQKHQHVLTGIPHKVISLFARRNAFDVVVLGTVYRDRLDR

SEQ ID NO: 371 - DNA, 443 bp, Homo sapiens
  misc_feature (1)..(47): wherein any n is one of a or t or g or c
nggcgtgacagattagaaacagtcccgtgtccttgtcggggctggtntctatcacggtgacgcgggcgccagcgggtagggagacagtgggtaggcgtccagcagcaagtttgagacctatccgtgcgcgccctggtgccacccgtagttctcccaccgagtgagggccgagaagttgtcctggtgataggtcgaccagagcatgacgaccaacgatttcgtcgagttgggaagctgggatcgttgcgacggcccgatcgacggccactgaagtcagcccactatcggcattgcggacgatatctccctgccctacagctcgcgtcatgacaagaacttggtcggcatgagaggcgcggtgccagggcacagctcccccagggcgcctacgcatgcacatagcacggctatgacgatgaggcgcggcgagcggtcgagccggg

SEQ ID NO: 372 - protein, 133 aa, Homo sapiens
  VARIANT (118): wherein Xaa may be any one of Asp or Glu
MCMRRRPGGAVPWHRASHADQVLVMTRAVGQGDIVRNADSGLTSVAVDRAVATIPASQLDEIVGRHALVDLSPGQLLGPHSVGELRVAPGRARIGLKLAAGRLPTVSLPAGARVTVIXTSPDKDTGLFLICHA

SEQ ID NO: 373 - DNA, 392 bp, Homo sapiens
  misc_feature (1)..(384): wherein any n is one of a or t or g or c
nntgatcaaaggataatactttcagcaggtaatgatgggaacatttttatttgggaccttgaccgggggaccaaaattcggaattactttaacatgattgaaggccaaggccatggtgcggtgtttgattgtaaatgttcaccagatggaaaccattttgcctgcacagattctaatggacatttgctgctttttggttttggatgcagtaaataatacgaaaagattccagatcagatgttcttccacacggattatcgtcctcttattcgtgatgccaataactatgtattggatgaacaaacccaacaagctcctcacctaatgcctcctccatttttggtggatgttgatggaaatcctcatcccacaaaattccaacgngttgtaca

SEQ ID NO: 374 - protein, 71 aa, Homo sapiens
  VARIANT (1): wherein Xaa may be any one of Phe or Ser or Tyr or Cys or Leu or Pro or His or Arg or Ile or Thr or Asn or Val or Ala or Asp or Gly
XDQRIILSAGNDGNIFIWDLDRGTKIRNYFNMIEGQGHGAVFDCKCSPDGNHFACTDSNGHLLLFGFGCSK

SEQ ID NO: 375 - DNA, 353 bp, Homo sapiens
agatctcaggccggagggattcggggtcgtgaaaactcacggaatccggaggctgatgggaggggcgcggtgcataagcatgatgctgcgaagaccctagttccggggatgggtgatgttgctgaggttgcgcgggttcaatgtgcttaccgggctcatcaacgttgctgggcaacgcatcggtcagagcagcgaaggagccaccgaacaggcccttgtccggagaggcggagaagctgtcggccctgtttgctgatgatcgaggtctacgttcaatgaccttcttgtcgtctgtggggttggcgttcaagttccccaggttttgcttgtccgaggtggactcgtgctgctcg

SEQ ID NO: 376 - protein, 71 aa, Homo sapiens
MCLPGSSTLLGNASVRAAKEPPNRPLSGEAEKLSALFADDRGLRSMTFLSSVGLAFKFPRFCLSEVDSCCS

SEQ ID NO: 377 - DNA, 350 bp, Homo sapiens
  misc_feature (279)..(345): wherein any n is one of a or t or g or c
atctacaacagcaaccgcgtgttgctgtgcagctggttgacgcgccagggttgcgaagtgctggatgccgggattttgccggatgacctggaggcaacccgccagcgcctgacgcagttgggcgatgtcgacctgatcctgtccacgggcggggtgtcggtgggcgaagccgatttccttggcatcgccttgcgcgaggccggttagctggagctgtggaagctggcgatcaagccgggcaaaccgcttaccttcgggcattttcgcggggtgccggtnatcgggctgccggggaatccggcttctacccctgtcagctttgcgttntttggccggccttatctnttacg

SEQ ID NO: 378 - protein, 68 aa, Homo sapiens
IYNSNRVLLCSWLTRQGCEVLDAGILPDDLEATRQRLTQLGDVDLILSTGGVSVGEADFLGIALREAG

SEQ ID NO: 379 - DNA, 345 bp, Homo sapiens
ggatccagggtgactgtgcagtgagtttgcagcagctcacccagcacgctgggggacggcagggctgggtccctttcttgggttgcagcttttccaggtcatgacattggctcactgagcacagctcacacagtggaacggccaaggctccaggaacacggctgggcaactgaactgaggtcctgaatcctcctctctgttccagactccactcagctcagcctcagccccaggactccttgttcccagggagttcagttccccgcagcagctccagctgggcctcctcgcccggaatgggctgggtcgctccagggcctcaacgtgctcggccatcaccacgct

SEQ ID NO: 380 - protein, 74 aa, Homo sapiens
MAEHVEALERPSPFRARRPSWSCCGELNSLGTRSPGAEAELSGVWNREEDSGPQFSCPAVFLEPWPFHCVSCAQ

SEQ ID NO: 381 - DNA, 301 bp, Homo sapiens
  misc_feature (195)..(295): wherein any n is one of a or t or g or c
gaattcctcttttgcccatggggagcgagaaacaggcagagcagagaatttaaagtgccaatgcgccgggtccgcactgtgatctggagagttggaaactttcggcagtgtagtccattgcacagaacacgcagcgtgcgcaatcccagtgcgggcccacagaagtgggaaaactgcaggcggctcccagccttngcccccgcgggcgggccgggcctcacgtctggttcagcccgccagcccctgtccgggagctgtntagtgcagattctgctgaggaaccctctagtatctnctgtgg

SEQ ID NO: 382 - protein, 80 aa, Homo sapiens
  VARIANT (45): wherein Xaa may be any one of Leu or Phe
  VARIANT (67): wherein Xaa may be any one of Ile or Leu or Val
  VARIANT (79): wherein Xaa may be any one of Ala or Pro or Ser or Thr
MRRVRTVIWRVGNFRQCSPLHRTRSVRNPSAGPQKWENCRRLPAXAPAGGPGLTSGSARQPLSGSCXVQILLRNPLVSXV

SEQ ID NO: 383 - DNA, 309 bp, Homo sapiens
  misc_feature (1)..(283): wherein any n is one of a or t or g or c
nnggatcccgacgttgtggtgngggattcggtgtnttattgtgtggcgaatatgccgggtgcggtgccgcatacgtcgacgtatgcgttgacgaatgcgacgatgcggtatgtgttgttgttggctgatgagggttggaggggtgcgtgtgggtcgcgtgatgatttgcggcgtggtttggcgacttgtggtgggaagttggtgagtgcgccggtgggtgaggcgttgggtattgaggctgtgcctgtgtctgaggtgttgtgaggttggtggtgggggtganaacagcacagccgcagctaccgcgcg

SEQ ID NO: 384 - protein, 87 aa, Homo sapiens
  VARIANT (1): wherein Xaa may be any one of Leu or Ser or Trp or Arg or Pro or Gln or Met or Thr or Lys or Val or Ala or Gly or Glu
  VARIANT (8): wherein Xaa may be any one of Arg or Gly or Trp
  VARIANT (12): wherein Xaa may be any one of Cys or Phe or Ser or Tyr
XDPDVVVXDSVXYCVANMPGAVPHTSTYALTNATMRYVLLLADEGWRGACGSRDDLRRGLATCGGKLVSAPVGEALGIEAVPVSEVL

SEQ ID NO: 385 - DNA, 156 bp, Homo sapiens
atcatgaggcgcaggctctgccggggcttggtgtcagtgacctggggctgtggggtggccaactccttggccatgtctcctgtgaccctgcgcttaccccgctgtgggcaccacgaggtggaccacttcctgcgtgagatgcccgccctgatccgg

SEQ ID NO: 386 - protein, 52 aa, Homo sapiens
IMRRRLCRGLVSVTWGCGVANSLAMSPVTLRLPRCGHHEVDHFLREMPALIR

SEQ ID NO: 387 - DNA, 324 bp, Homo sapiens
agatctggttgtattaaacacgagaatgaagagaggaaaacaccttcgcccacggtgtgctctggggacatctccaggtgtgggtggtggcgtcagccacaggacaggcccttgaatggtctcctgccacattgcatcagggtcggtctgcatggcccacaagtacagcagaagtgatggcatatgccttcgaggctagcttaagaaagacacggtgattagcctgcattagtttctgccttgggctgttcactatggaagccagctgctgtgttgtaaggatgttcacgcagccctctcagaggtcccagaagtgaagaactg

SEQ ID NO: 388 - protein, 61 aa, Homo sapiens
MPSLLLYLWAMQTDPDAMWQETIQGPVLWLTPPPTPGDVPRAHRGRRCFPLFILVFNTTRS

SEQ ID NO: 389 - DNA, 336 bp, Homo sapiens
  misc_feature (1)..(336): wherein any n is one of a or t or g or c
nncggccgcatatcctgaccgagatcgcccggaccgcgcgcggctgcgatgaccagcccggtgcatctgatcctggagaacgagcataacgacgctcacaagctcgagcgccgcgatggacggccgctnaccttcaccgcgcagtggaacgacgacgtccatcatgtcctgcatgtcgcgaccaccggcgagagcgccggctactaccaggactacaccgaccgccccaacctgctcggccgcgccattgccgagggcttcgcctatcagggcgagacgtatccctatagcggcctgcagcgcggcgagcccagcgcggaccttccgccggacgcn

SEQ ID NO: 390 - protein, 96 aa, Homo sapiens
MTSPVHLILENEHNDAHKLERRDGRPLTFTAQWNDDVHHVLHVATTGESAGYYQDYTDRPNLLGRAIAEGFAYQGETYPYSGLQRGEPSADLPPDA

SEQ ID NO: 391 - DNA, 463 bp, Homo sapiens
tggccaggacacctcccttggttctctctcacgccctctgcattcccgaaccgcctccgcctcccagactcaaggatccgattctgttccagcttggcccagcagccttggtcaggtgacgttcagggttgaatccactctgccttgcctggaacccccgctggcatgtagcggcctggaaagagaaaccagatgcggacgtcctttgaaaccctgaaacacaaggcgcctcctgctccccgggaggccgggctgccgagggctgaggccctagacagggcagggtgttcgagcctcagtgtccccgtttgtcaacggcctttcctgcctcttctccatggcggtggggtgagatggtggtgggaggtggggcggcgaaaaagaaaattccaggtctccgcaggggtccagaatggcaggacccccaagcagaccgcgcccattcaccggttgggggtcgcga

SEQ ID NO: 392 - protein, 90 aa, Homo sapiens
MRTSFETLKHKAPPAPREAGLPRAEALDRAGCSSLSVPVCQRPFLPLLHGGGVRWWWEVGRRKRKFQVSAGVQNGRTPKQTAPIHRLGVA

SEQ ID NO: 393 - DNA, 515 bp, Homo sapiens
  misc_feature (1)..(449): wherein any n is one of a or t or g or c
ngcctggccttccttgcccctttccccttttctacctgagggtatctctgtctcctaggaggagaaagccacaacactgtgcctgagggaaacaggtttgtatccagagcttttgttctctccccttttgttcccctgcttctctgaggctccctcttccaaaaagcacccactaggggcgaggcccaatgccaattcttcatagccatggctgtcagcctcatccccacaccacgcttagccttgccacaccacacctcgggagagactgtatttgcttgcttgctgcactcccacaggctgtggcacagataagataggctgcagcctatgggcaaattcccaggggattagatcctttatctctcattcaggaaggctttgtggaatgctagtcagggagagtgatgtcattgcagagaaaacattgaattcgctatgtatactanaacaacaagccgtttgccaccttccctggtttaactatttatagctataaattatcggccacgcgt

SEQ ID NO: 394 - protein, 74 aa, Homo sapiens
MRLTAMAMKNWHWASPLVGAFWKREPQRSRGTKGERTKALDTNLFPSGTVLWLSPPRRQRYPQVEKGKGARKAR

SEQ ID NO: 395 - DNA, 408 bp, Homo sapiens
  misc_feature (1)..(2): wherein any n is one of a or t or g or c
nntggccatcaatggcgtaatttcggcgcaactaaaaatgccgatggtacttataaccaagatggttttgaccaaattaaatggttaattaatgaaattaaaaccaacccaaattcacgccgtttaattgtctctggttggaatccaaatgaggcaggacaagttgcattaccgccttgccatacactcttccaattttttgtacaagacaacaagttgtcatgccagctttatcaacgtagtgctgacgtattcttaggcgtgccatttaatattgccagctatgccctactcacccatatgattgctcaggtgtgtggcttaggtgttggtgattttgtttggacaggtggcgatacgcatctttacgcaaaccattttgaacaggcaaaactacaattgacgcgt

SEQ ID NO: 396 - protein, 136 aa, Homo sapiens
  VARIANT (1): wherein Xaa may be any one of Phe or Ser or Tyr or Cys or Leu or Pro or His or Arg or Ile or Thr or Asn or Val or Ala or Asp or Gly
XGHQWRNFGATKNADGTYNQDGFDQIKWLINEIKTNPNSRRLIVSGWNPNEAGQVALPPCHTLFQFFVQDNKLSCQLYQRSADVFLGVPFNIASYALLTHMIAQVCGLGVGDFVWTGGDTHLYANHFEQAKLQLTR

SEQ ID NO: 397 - DNA, 406 bp, Homo sapiens
  misc_feature (1): wherein any n is one of a or t or g or c
ncggccgagcaactggtcagccaggcggtggtcacacaggcggcgcgcgcccagggcctgcatgtgcctgacagcacgctgcgcgacgcgatcttcgcgctgccggcgttccagggcgccaacgggcagttcgaccgcaacctgttcaaccagcgcctgcagcagatggggctgaatgaggcgacggtgctgtcgctgatgcgcgaggacctcaccgcgcaggcgctgctgggtgcgttgcaggccggggtgaccgcgccggcgccgctgatcgacaacgccttcgcctatgacacggcgacgcgtacggtgtcctacgtcacgatcccgttcgccgctgcggcctcgatccccgcgcccgacgaggcgacgctgaagcgctggtacgacaaccacgccgacgcgt

SEQ ID NO: 398 - protein, 135 aa, Homo sapiens
  VARIANT (1): wherein Xaa may be any one of Ala or Pro or Ser or Thr
XAEQLVSQAVVTQAARAQGLHVPDSTLRDAIFALPAFQGANGQFDRNLFNQRLQQMGLNEATVLSLMREDLTAQALLGALQAGVTAPAPLIDNAFAYDTATRTVSYVTIPFAAAASIPAPDEATLKRWYDNHADA

SEQ ID NO: 399 - DNA, 447 bp, Homo sapiens
  misc_feature (208): wherein any n is one of a or t or g or c
tggccacatcacacatagcatcatccaggggcagatggtctcagaaaatgctagaccagccatttaaaggcacagctaaagtgccagcttggtggcaacattctgaaaggatggggcaccatcctttaggatgcagtatatagacagagacctttatattgtgctaggtccccaggaggaagaatacatgcgtctaggaaccaagggntacaagcaggagtaaccccacttacccttactcctaatgacccactgggggattttgtatttcatatccatgcaactctgagctctgcaaaattggaggtcctggtctccaaagaaggtgcactcttgccaaaagatacatcaagagtcccaccgaactataagctatgcctcccaccaaggcatttcaggctccttgtgtttaggaaccagtctgagagaaaaggagtcaccatattg

SEQ ID NO: 400 - protein, 106 aa, Homo sapiens
  VARIANT (27): wherein Xaa may be any one of Ile or Leu or Val
DAVYRQRPLYCARSPGGRIHASRNQGXQAGVTPLTLTPNDPLGDFVFHIHATLSSAKLEVLVSKEGALLPKDTSRVPPNYKLCLPPRHFRLLVFRNQSERKGVTIL

SEQ ID NO: 401 - DNA, 426 bp, Homo sapiens
  misc_feature (1)..(2): wherein any n is one of a or t or g or c
nntggccagcctggcttcgctaaagaccccaccgctgaacaagtgcgggaggcccgcgctgtttccgcagtagttggttcgttggagcccaccggacccataacattgtggagtttatatgttcccaatggtagggagctgacggaccgccactacacctacaagctggagtggatgcggaaactgcgggaggcttccgcgaaatggctagcagacaaccccgacgcaaatatcatgatggcgggcgactggaatgttgcgccgctggatactgacgtgtgggatccagagttttttgtggggaaaacccatctttccccgcctgagcgggaggcgtttgccgctattggcgacactggtttccgggaagtgacccgcgagttcctccccgctccgcacacgtatacgtattgggattacacgcgt

SEQ ID NO: 402 - protein, 142 aa, Homo sapiens
  VARIANT (1): wherein Xaa may be any one of Phe or Ser or Tyr or Cys or Leu or Pro or His or Arg or Ile or Thr or Asn or Val or Ala or Asp or Gly
XGQPGFAKDPTAEQVREARAVSAVVGSLEPTGPITLWSLYVPNGRELTDRHYTYKLEWMRKLREASAKWLADNPDANIMMAGDWNVAPLDTDVWDPEFFVGKTHLSPPEREAFAAIGDTGFREVTREFLPAPHTYTYWDYTR

SEQ ID NO: 403 - DNA, 459 bp, Homo sapiens
tggccagttcacctccagtcatggttgcagtacttccaaaattctcagcaaggcccaatctctgagcagctagtccaggaatttccccaggtgttaacaccaccttcccttacacatgtcattctgagtgactgttcccagacactaagctgttaggagtcggctcaactatgcacagggaaggcactggtcttggagctggtacttttcatccactcttcctgctctccttgaacatttgaatacaaacctggttccaaatgccatctcaccaccacgtgctctcctgtttgcttccctggatctgattcttgattaccttgattttctctttttccactcaaatcaactcccacagcactgaggttcttgtggaccttggacctctcaaggatttgagcatggggcagggacattcctggtcctgcaggctctcagcttgcttccctggcctgtccc

SEQ ID NO: 404 - protein, 83 aa, Homo sapiens [sequence omitted]

SEQ ID NO: 405 - DNA, 446 bp, Homo sapiens
agtactgacatttttcccgatttaaagttaaatgtcttgtaaggcaatgttgactgatgcaggaatacttgtagacatgtatgcatgtgattggtgcttatatgcacacagtcccccacaccacaggaaaaaaccgatgaccagagcctgaccattatggccaaggccaaatagccaaagtttgcctttaatctattttcttcatatctaaaaattggaggtcaatactgtggacaggtctgaagacatagagttttgttctcctgtggccccatcattcttcagtggtctacctgtggttattttattcttgttaccttctgctctttctatgaccactatctgttccacccttgaaactgaagacagatgttagtagaaagaggctgttccctcatgtcgggcatgtgggatacgatgaggtttctcttcaaatagcctgatca

SEQ ID NO: 406 - protein, 51 aa, Homo sapiens
MVRLWSSVFSCGVGDCVHISTNHMHTCLQVFLHQSTLPYKTFNFKSGKMSV

SEQ ID NO: 407 - DNA, 415 bp, Homo sapiens
  misc_feature (399): wherein any n is one of a or t or g or c
agatcttggtgagctgcatgccggctgcggcgtcggtctctacgggagcattgaggagcccaggagcaaggccaccgcgttgggccgtggtggcggtgttaaagggttgggcagggaaagactcggcagtgtggggcggctgaggagccggcgcctgtagtccccaggattgagctagttcccgatcctgctcaccgataggtcgcagcgagtcaccgctccagtccggtgaggtgccatgtcgtggtggctcgaagggccctggctcgctcggaatcgcatggtccagcgagtactggggttcgtcagattcgtaaggtcggtcgtggtcgctcatgatgcctttcatggttcccgaaaagggtatcgactagtagccgacaccccctcacgccttangtgacgtgaaaaagac

SEQ ID NO: 408 - protein, 116 aa, Homo sapiens
MKGIMSDHDRPYESDEPQYSLDHAIPSEPGPFEPPRHGTSPDWSGDSLRPIGEQDRELAQSWGLQAPAPQPPHTAESFPAQPFNTATTAQRGGLAPGLLNAPVETDAAAGMQLTKI

SEQ ID NO: 409 - DNA, 399 bp, Homo sapiens
cggccggggggaggaagggggaggaaggaggactggcaaatcacgagagacctatgaggaaggttttgcagaacgaaactgtttgttgtgaaacgtttaattattgcacttgggggtaatttattatcagggaaattaagtgattccattagcctcctgtcgctttccaaaataaatctgtccgggcagggtgaggggggaaaaggaaatgagagcttctctgttttaatttgtttttctacagattgccaactggaggtgcgggctccattgatccatgggaagggagctggcggccatcctgggtgagcctctgctaacctcagcccctctgcagccacatttccatatcggaacataacccgagcccagcttgggaaagtgtgtgctagtgccagt

SEQ ID NO: 410 - protein, 119 aa, Homo sapiens
MFRYGNVAAEGLRLAEAHPGWPPAPFPWINGARTSSWQSVEKQIKTEKLSFPFPPSPCPDRFILESDRRLMESLNFPDNKLPPSAIIKRFTTNSFVLQNLPHRSLVICQSSFLPLPPPG

SEQ ID NO: 411 - DNA, 445 bp, Homo sapiens
  misc_feature (1)..(362): wherein any n is one of a or t or g or c
nccagccagctgccgactagtttgacccncgctacggactcgacccagcactcgctgcgcgagttcattgacctggtggctgatgccggatatgtcgtcgactccgatgagcatggtgacgaccccgaactcatcgcccctgacggctctgccgtggaacctgggcacgaggattatccgtatcccaacctcatggatcgtcgcgaatacgaaactcaaaagagactgctgcagattgagctactganactccagtactcgatcgacgataccggtgagcgtcacgtcatcatctttgaaggtcgcgacgccgcaggcaaaggtggggccatcaagaggtttagcgaacacctcaatccgnncgtcgtagccctcgataagccatcagaccgcgaactgggccaatggaatttccagcgctacattcaacacctgcctacggccg

SEQ ID NO: 412 - protein, 148 aa, Homo sapiens
  VARIANT (1): wherein Xaa may be any one of Ala or Pro or Ser or Thr
  VARIANT (10): wherein Xaa may be any one of Arg or His or Leu or Pro
  VARIANT (83): wherein Xaa may be any one of Arg or Ile or Lys or Thr
  VARIANT (121): wherein Xaa may be any one of Phe or Ser or Tyr or Cys or Leu or Pro or His or Arg or Ile or Thr or Asn or Val or Ala or Asp or Gly
XSQLPTSLTXATDSTQHSLREFIDLVADAGYVVDSDEHGDDPELIAPDGSAVEPGHEDYPYPNLMDRREYETQKRLLQIELLXLQYSIDDTGERHVIIFEGRDAAGKGGAIKRFSEHLNPXVVALDKPSDRELGQWNFQRYIQHLPTA

SEQ ID NO: 413 - DNA, 379 bp, Homo sapiens
aaacgaatgcctcgacgagtcactgaggtcgccttgaatctgcaacgcgccccgcatctacccttctcagataccgcagctctcggcaccaacgccgtcgtactgcgtattcagcctgatgagggagttactctgaaattcggcgccaaagtgcccggcacccagatggaacttcgcgatgtcacgatggacttcgcgtatggatcttccttcaccgaggccagcccggaagcctacgagagactcattcttgatgttctcttgggcgatccgccactgttcccccaacatgaggaggtcgaattggcttggaagatccttgacccggtgctggatttctgggccgagtccaacactcccccgtgcgaatatccggccg

SEQ ID NO: 414 - protein, 126 aa, Homo sapiens
KRMPRRVTEVALNLQRAPHLPFSDTAALGTNAVVLRIQPDEGVTLKFGAKVPGTQMELRDVTMDFAYGSSFTEASPEAYERLILDVLLGDPPLFPQHEEVELAWKILDPVLDFWAESNTPPCEYPA

SEQ ID NO: 415 - DNA, 365 bp, Homo sapiens
  misc_feature (353): wherein any n is one of a or t or g or c
atcacccaactcgacgttgcacgcaagctggtggagatagacgccatcatcctcgacatcgaacgcacaaagttgcaagagttcggggttgaatggggctttcaaaacagccgctggcgcggcggcgtcaacgtggcaccgggcacgacttctcagttgtcgattggcaaccccgggcgcttctacgctcacatacgtgccctggagtcccaagggctggcaaccctggtctccaacccttccgtgctcaccctggagaaccagccggcggtcatcgatttcaaccgcacgcgatacctgaaggccggcagagactacgcaaccattttacccgtgaccgtcggcaccagctntcatgtggtacc

SEQ ID NO: 416 - protein, 121 aa, Homo sapiens
  VARIANT (118): wherein Xaa may be any one of Cys or Phe or Ser or Thr
ITQLDVARKLVEIDAIILDIERTKLQEFGVEWGFQNSRWRGGVNVAPGTTSQLSIGNPGRFYAHIRALESQGLATLVSNPSVLTLENQPAVIDFNRTRYLKAGRDYATILPVTVGTSXHVV

SEQ ID NO: 417 - DNA, 577 bp, Homo sapiens
aagcttccctctgcgatttggggaagagagtaagtgcttctttttaggagactgaaagggcaatggcactgcggagacaggaggatggggaaggctagcttcttttggcgggtcacaggggtaggtcgagatggtttggatttggggaacttctgattttgtaggagtagcagaaacttctggcactcactgacatgtggccttgacccagtcccctcacttctcagagcctcagttttcttatctgggttaacactgtcccatcccggtgtcatttgaggctggataattcagaaatccaacatgcttcatgtagaaatattgcctgggtctctcactgagaccatgggatcagtccacatccctgtaggtgaggttgaggtccccactgtcagtcaccttaagggaggttggtctggaaattgaagactcagaagagcagctgagctgggcatcagctcatctcttcccagcgtagctcctcctcaagtggtggggaagagttcagcagcccagggactgagtgggaaatggagcattagttttctcttctcatagccagtcacagccttgatca

SEQ ID NO: 418 - protein, 91 aa, Homo sapiens
MTPGWDSVNPDKKTEALRSEGTGSRPHVSECQKFLLLLQNQKFPKSKPSRPTPVTRQKKLAFPILLSPQCHCPFSLLKRSTYSLPQIAEGS

SEQ ID NO: 419 - DNA, 408 bp, Homo sapiens
ggatccgggggccaagtgttcgatgagttcaacgacagtagggcggccgaccgcatcttcgacacgccgcaacagtcggacgtcctcgtggagctgtgcgagaaccttcaatcgcagcgaaggcacgagggaaccatcgatacgggggtagatgacggagctatcaccggagggaaaggccaggtcagccgaggtgtcggcgttgggatcgacgaggtagcgcgaaaactgatcgaaccagaagttgagggcccagtgcagcagaccgggggtgtggtgccaccacagcagcagtcccagggcacgtagtcgggtgagcggcatgccgagatggcgattcggttcccagaaagtcgaggcgcaggaagtgtaggcccacatgcccgtcagtcctgcggcctcgcactc

SEQ ID NO: 420 - protein, 127 aa, Homo sapiens
MWAYTSCASTFWEPNRHLGMPLTRLRALGLLLWWHHTPGLLHWALNFWFDQFSRYLVDPNADTSADLAFPSGDSSVIYPRIDGSLVPSLRLKVLAQLHEDVRLLRRVEDAVGRPTVVELIEHLAPGS

SEQ ID NO: 421 - DNA, 412 bp, Homo sapiens
ctcaaccggatgcccggtatccgttcagcacgctggtcggggcctcacgctcatgatgagcgcaaccttcagctgctgcttgatcagacttttgaccttccggacgagcgacgtcacggtaggttcgtatgtgcgatggctttcgtcgacccggacggcaccgagatcaccaaggtggcgacgatggaggggcggatcatctcggaggcccgcgggaaaaacgggtttggttatgacccgatgtttgttcccgatgcccagcccggtgacctcaccagtgctgagatgactcctgaggtcaaggacgccatcagccaccgaggacaagctgttcgcgcgattgttccggcggtcgtcgcccatttggaggggcgctgaatgcagatctacctcgacttgttgcggcggatcc

SEQ ID NO: 422 - protein, 125 aa, Homo sapiens
LNRMPGIRSARWSGPHAHDERNLQLLLDQTFDLPDERRHGRFVCAMAFVDPDGTEITKVATMEGRIISEARGKNGFGYDPMFVPDAQPGDLTSAEMTPEVKDAISHRGQAVRAIVPAVVAHLEGR

SEQ ID NO: 423 - DNA, 301 bp, Homo sapiens
ggatccagccaaaactggatctcctcgtaccgtcactacgacacgtcgcctaatccccaaccgggagtcggggatgcggtcagaaaaacctgcgctgtgcggcgacctgtccggtgtactcggcataggctttctgcgtcgacttcaggcgcgattgcgacgtgaccggtacatcccaccatcccgatgcaggtgggttgggcccgtacaggtcagtctcaatatggatcatcgtggcatgatcagacgcctcggccttgcggtaagcctccctgaactccttgatggtacgaacctcgag

SEQ ID NO: 424 - protein, 76 aa, Homo sapiens
MRSEKPALCGDLSGVLGIGFLRRLQARLRRDRYIPPSRCRWVGPVQVSLNMDHRGMIRRLGLAVSLPELLDGTNLE

SEQ ID NO: 425 - DNA, 335 bp, Homo sapiens
  misc_feature (156): wherein any n is one of a or t or g or c
ngcactcaagtcgtccgacccgacgggtccatcatcgtcgtactggggtgttaccacgtcagtcgtcagaacacaaacaccggacggctcactcgcagcatgcttgacgacgccgtcaacacgctccggaatctggccagtaccgctgacggaacnacctccatgagtgcaggcgcaacaccgtcaccagattcggcagcttcatcgacactcagggaaactgtatccatctcggcaaggatggcgggacagtgtaaacaatcccgctcaccgttcgtcttccgagcattggcaacgaccgtaggctgggatcatggtcattctccccaagatct

SEQ ID NO: 426 - protein, 111 aa, Homo sapiens
  VARIANT (1): wherein Xaa may be any one of Cys or Arg or Gly or Ser
XTQVVRPDGSIIVVLGCYHVSRQNTNTGRLTRSMLDDAVNTLRNLASTADGTTSMSAGATPSPDSAASSTLRETVSISARMAGQCKQSRSPFVFRALATTVGWDHGHSPQD

SEQ ID NO: 427 - DNA, 255 bp, Homo sapiens
  misc_feature (1): wherein any n is one of a or t or g or c
ngtcgactacagccctgcaaagaagctggttacctggttcgaaatagtgagtcagggaacagcaggtactccattgccctaaagactagtcaaggatgtgtccacatcatagtggctcagaccaaagacaacaaatacacactgaatcagacaagcgctgtgtttgacagcatccctgaagtggtacactattattccaatgaaaagttgcctttcaaaggggcagaacacatgactttactctacccagtgcac

SEQ ID NO: 428 - protein, 85 aa, Homo sapiens
  VARIANT (1): wherein Xaa may be any one of Arg or Cys or Gly or Ser
XRLQPCKEAGYLVRNSESGNSRYSIALKTSQGCVHIIVAQTKDNKYTLNQTSAVFDSIPEVVHYYSNEKLPFKGAEHMTLLYPVH

SEQ ID NO: 429 - DNA, 321 bp, Homo sapiens
ccggatttccccggcggcgccctcatcgtgggtcggcagggcatcgaggacgcctaccgcaccggccgcggttcggtgacgatgcgtgccgtcatcgacatggaagaggacaagaagggacgccagtgcctggtcgtcaccgagttgccttatatgtgcaacccggacaacctcgccaccaagatcgccgacctggtgaactccggtcgcatcaacggtatcgccgacatccgtgacgactcctcagcccgtactggtcagcgtttagtcatcgtcctcaagcgtgacgctcagccgcgtgtcgtcatgaacaacctgtac

SEQ ID NO: 430 - protein, 107 aa, Homo sapiens
PDFPGGALIVGRQGIEDAYRTGRGSVTMRAVIDMEEDKKGRQCLVVTELPYMCNPDNLATKIADLVNSGRINGIADIRDDSSARTGQRLVIVLKRDAQPRVVMNNLY

SEQ ID NO: 431 - DNA, 435 bp, Homo sapiens
agatctgactgaagtcccctgcggcagccctgtgctgacatccattgccccaaggataaagacctgggtcctcagtccctccacagcagcctgcacccaagtcccctcgctgagctccagccactggccccactgggcagaagtgaccatgtgatacagagctcccgcctccccggagtggggtgagaatctaagatccccccttccccagggctgtgcaagaggctgaacacctgtgtggacctgtctgccctttgcccccacacgctagctgacagtaagccccccaggcaggcacacaggagaaggataaagaaggagacccccgtgaactgctcagaacaggctcagccccagggggcctctgcccccacctccccacgctctatggttctctctccattatgtccagggcctcccaagaccttcacgtac

SEQ ID NO: 432 - protein, 50 aa, Homo sapiens
MVTSAQWGQWLELSEGTWVQAAVEGLRTQVFILGAMDVSTGLPQGTSVRS

SEQ ID NO: 433 - DNA, 270 bp, Homo sapiens
  misc_feature (1)..(270): wherein any n is one of a or t or g or c
nnctgcagattatttccaattgaagtgagacacttttaaggatcttcccagcgtcggcgaaggagccacatgtacgaagagcttgaccgacgactcgtcaacgtcttgcagatcgacccgcgtgccagctgggccaaggtatgcaaagttttgggtgtctccccgacgactgtcgcccaccgctggcagcgcctggtcgatgactgaatcgcatggataactgcgtgcccgaacctcaatcagcagattacggccatcgttgaggtctan

SEQ ID NO: 434 - protein, 55 aa, Homo sapiens
GSSQRRRRSHMYEELDRRLVNVLQIDPRASWAKVCKVLGVSPTTVAHRWQRLVDD

SEQ ID NO: 435 - DNA, 478 bp, Homo sapiens
  misc_feature (1)..(2): wherein any n is one of a or t or g or c
nngtcgacgaaagagctcgtgcaggtcgcccgtgggcttcaagtccatgcccgacaccctaccagtgttgccacggaccagtccgaggaaaacgtgtgaaaaacgaccctgagattgctatggtgaacgcacttgacacattacgcattgcggcatagcgaggtgacaaaattggttcaacgaatgacggcaaaaggccatcaccgacgtcaaaaactcatccgatcagcagcatcattgttgaacagtggtggccccagcgccgtcaccatgagagctgcagcacgcatggcagatctctcaccctcctctaccgtgtattactttgatgaccacgaagaactcctggctgaagctgccaaactcaatattcgagcgtgggctcacatcgctgaaacgattgcggacgaggctgaaaaccatcgccccaaaaccggggtggatgacgtgatcgaatacctgattcgagcaatgatca

SEQ ID NO: 436 - protein, 117 aa, Homo sapiens
THLTHYALRHSEVTKLVQRMTAKGHHRRQKLIRSAASLLNSGGPSAVTMRAAARMADLSPSSTVYYFDDHEELLAEAAKLNIRAWAHIAETIADEAENHRPKTGVDDVIEYLIRAMI

SEQ ID NO: 437 - DNA, 271 bp, Homo sapiens
acgcgtcacgaccttctcctcggcatcaaggattccgtgaacactgtcgcgacggcacatgatgtgccgaccccaccggacagcgcactcaggagccctttgtatgaggacctccccgccaccgcgacaccccagacatgggattcaaacacggttgagagatcagcccgcgcactcaggagcatctggctactgagcgatttaatggatagctctcaacgccgacagttgggcctctcccagttcatagcggacatgaataatggcgcgc

SEQ ID NO: 438 - protein, 59 aa, Homo sapiens
MLLSARADLSTVFESHVWGVAVAGRSSYKGLLSALSGGVGTSCAVATVFTESLMPRRRS

SEQ ID NO: 439 - DNA, 222 bp, Homo sapiens
  misc_feature (1)..(2): wherein any n is one of a or t or g or c
nnacgcgtgctcgacgccctgccgtggaacagcgatggcctgatcgccgccatcgcccagcaacacggcagcggcgaggtgttgatgctggcctggatgaaccgcccggccctcgaagaaaccctggccaccgggcaggtctgctactggtcccgctcgcgccagcagctgtggcgcaaaggcgagacctccggccactggcaactgctggtggaggcgcgc

SEQ ID NO: 440 - protein, 74 aa, Homo sapiens
  VARIANT (1): wherein Xaa may be any one of Ala or Arg or Glu or Gln or Gly or Ile or Leu or Lys or Pro or Ser or Thr or Val
XRVLDALPWNSDGLIAAIAQQHGSGEVLMLAWMNRPALEETLATGQVCYWSRSRQQLWRKGETSGHWQLLVEAR

SEQ ID NO: 441 - DNA, 294 bp, Homo sapiens
  misc_feature (1)..(2): wherein any n is one of a or t or g or c
nngcgcgccggaaaggctggtcttgcctggttggctggctgcgctgctgtctccgcgtggtggattgttccgctgctcattctgggccgctacgccccgccatttacggagttcatcgagtccgctggggtaaccacccgctggctcaacctggcggagatcctgcgcggcacaacaagctgggcgccctttgtggataccgagcgcgtcgccggcacggcgttggccaccgagcccgtctttgtgctgttcacgattggcgtggccgccctggggctggtgggcgtggcgcgc

SEQ ID NO: 442 - protein, 98 aa, Homo sapiens
  VARIANT (1): wherein Xaa may be any one of Leu or Ser or Trp or Pro or Gln or Arg or Met or Thr or Lys or Val or Ala or Glu or Gly
XRAGKAGLAWLAGCAAVSAWWIVPLLILGRYAPPFTEFIESAGVTTRWLNLAEILRGTTSWAPFVDTERVAGTALATEPVFVLFTIGVAALGLVGVAR

SEQ ID NO: 443 - DNA, 262 bp, Homo sapiens
gcgcgccgcagcggagggggtccaatgggggcgcgaacctgggccgagagcccctcggggtccccaggcgcggtcctgggaaggcctggggatcgccaaatgcagaccttcctggccgctttgtgccgccgagtgtggcctgggctaggaggtgactttcgcggacggagggggcacctctctttctttctgctgtaactcatttggagtccccgtcaccccctcggcctccctccgcgcgtgctgcttggcaggcacgcgt

SEQ ID NO: 444 - protein, 67 aa, Homo sapiens
MSYSRKKERCPLRPRKSPPSPGHTRRHKAARKVCIWRSPGLPRTAPGDPEGLSAQVRAPIGPPPLRR

SEQ ID NO: 445 - DNA, 261 bp, Homo sapiens
  misc_feature (1): wherein any n is one of a or t or g or c
ngcgcgcctgacgaagtcgtcaaacccttccaccatgacggttatgacatccacccggtgccactgagcgcccaggaggtcgaggagtactacgaggggttctctaacgcgaccctgtggccgctgtaccacgactgcattgtcgagccagtcttccaccgtgagtggtgggacgcattccagaaggtcaacaagaggtttgccgagcaagctgctgaacaggccgcagagggcgccaccgtgtgggtgcaggattaccag

SEQ ID NO: 446 - protein, 87 aa, Homo sapiens
  VARIANT (1): wherein Xaa may be any one of Arg or Cys or Ser or Gly
XAPDEVVKPFHHDGYDIHPVPLSAQEVEEYYEGFSNATLWPLYHDCIVEPVFHREWWDAFQKVNKRFAEQAAEQAAEGATVWVQDYQ

SEQ ID NO: 447 - DNA, 280 bp, Homo sapiens
atctacaagctcgatgtggtcgagatcccgaccaacctgccggtcgcgcgccgtgacggcgacgacgaggtctacatgaccggggcggagaagttcggcgcggtcgccgacctgatcgccgaggttggcgccaccggccagcccatcctggtcggtaccaccagcatcgagaagtcggaagccctgtcgggcctgctgaacgcccgcgccatccgccattcggtgctgaatgcgcgcttccacgagcaggaggccggtatcgtcagccaggccggcgcgc

SEQ ID NO: 448 - protein, 93 aa, Homo sapiens
IYKLDVVEIPTNLPVARRDGDDEVYMTGAEKFGAVADLIAEVGATGQPILVGTTSIEKSEALSGLLNARAIRHSVLNARFHEQEAGIVSQAGA

SEQ ID NO: 449 - DNA, 289 bp, Homo sapiens
  misc_feature (289): wherein any n is one of a or t or g or c
agatctcacagcactctctgtagtttagatttatttgggccctctccaaaggtcagcagatatttaaatgtactctgatcctgaagtgtgtacaagttatttatgaaaagactcaaagtcttttgcaaataaatgcatagagctggaactatataccaggacattttgcctaagtccaaatataaattttaattatgtttttactatgaactagacagactcttagatacaaaacgacattgtaaagtatggagatttgcaactttcattgtatttgtgcctgaacatn

SEQ ID NO: 450 - protein, 52 aa, Homo sapiens [sequence omitted]

SEQ ID NO: 451 - DNA, 355 bp, Homo sapiens
gcgttgacgcgcatgcggatgcagggtctcgtggaagatctgtggtcgcgccacggctgtgcggtgctgctggtcacccatgatgtggacgaggcgttgtcgctcgccgaccgggcggtggtgctggagcgcggccgcatcagcactgatctgcgtgtcgcagtgcctcgccccagaccgcatgcctcgcccgaacgcgaggcgctgcgccggcagttgctcgcgtcccttcatgtccacgagcaggctgcctaagctgactcagagcatcggcatgccgccatgcacaggcagcagcgccccggtggtgtaggtgttgtctggatcggcgagatagacataggcgccggctagc

SEQ ID NO: 452 - protein, 84 aa, Homo sapiens
ALTRMRMQGLVEDLWSRHGCAVLLVTHDVDEALSLADRAVVLERGRISTDLRVAVPRPRPHASPEREALRRQLLASLHVHEQAA

SEQ ID NO: 453 - DNA, 309 bp, Homo sapiens
gctagcatggaacaatgttggctgactgcgccaggagctctaatctggcaagaatctagaggagaaggtggattgtgggatgaataagcaaaggaggagagttaaggagttgggggtggtagtgagagagcagaagagaagcacctggttacaggttgaggctgtgcacaatgtagaaagacatcagagatgttcaatggtgctcacttcggcagcacatatgctaacattggaataatacacagaaaattaacatggcccctgtgcaaggctgatgtacaaattcatgaactgtccctttttctttca

SEQ ID NO: 454 - protein, 52 aa, Homo sapiens
MNKQRRRVKELGVVVREQKRSTWLQVEAVHNVERHQRCSMVLTSAAHMLTLE

SEQ ID NO: 455 - DNA, 529 bp, Homo sapiens
accggttttcgagctactccgtgcggcgtcagtcatcaatggcgtcagaaagcatgcaagcacagctgccctgacctttcaagaaaatgccgaatttatcttatattacgagattacatatcacatttcgacacagacgcgatctgcgaggtctctcagaaaggctgagatcccctcggtctgatcacagatgacatcggcgtagtcagccattaatggctgctccccggagaaactgaccacgcgggcaccagggtgccccgcattgatccactcggctaccacttcgagagcagggacatcacccaaatcatcaccgcacatgataagaatctgcggctcgacctcgtcaatgagctcgcgtaaggcctgagccttcgtcgtgacggccgatttcacctcgatgatattgcgcccatcttcaccgtgcaggtccaggtcggtggcgatctcacgcaccctcggcacggcggtagccagggcatgagtcgggtcggaggctcgccgggtgtgcagtgcgacggcgcgc

SEQ ID NO: 456 - protein, 67 aa, Homo sapiens
MCGDDLGDVPALEVVAEWINAGHPGARVVSFSGEQPLMADYADVICDQTEGISAFLRDLADRVCVEM

SEQ ID NO: 457 - DNA, 535 bp, Homo sapiens
  misc_feature (1): wherein any n is one of a or t or g or c
ngcgcgccacgaggcgctcgaattcctgctcgcctgcgcgctcgaaacccgcaaggccggagacctgtcacgatgagccagctgaccatctaccgcgatgcgacccccgacgcgccggaactgcgcagcaacgatccggacgtcattgcctcgcgcctgcgcgagatcggcgtgcgtttcgagcgctgggcaagcccggtcgcgctgtcgccggatgatccggccgagacgatcctcgaagcctatcgtccgcatctcgacgcgctgatgggcgagagcggcgctggttcggccgacgtgatcaagatcagcgcggcgacgccgaacaagcaggcgctgcgcgacaagttcctgtccgaacaccagcacaccgaggacgaggtgcggttcttcgtgcatggcagcggcaatttcatcatgcatgtcgacggccgcgtttacgatgcgcattgcacgcagggcgacctgatctcggtgccggcctcgacgaagcactggttcgatgccgggccggacccgttcgtaccgcgctgcg

SEQ ID NO: 458 - protein, 153 aa, Homo sapiens
SQLTIYRDATPDAPELRSNDPDVIASRLREIGVRFERWASPVALSPDDPAETILEAYRPHLDALMGESGAGSADVIKISAATPNKQALRDKFLSEHQHTEDEVRFFVHGSGNFIMHVDGRVYDAHCTQGDLISVPASTKHWFDAGPDPFVPRC

SEQ ID NO: 459 - DNA, 366 bp, Homo sapiens
ccgcggaaaaaggcaacaaagatttatttggggcatccttatggggatgaatgatgaattgggggtaaagtgagatatttgccatggtaactgaattctctgtctttattctgagcatcttacctcttgctctatattcttaacctcaaacttcaattttttaaatgaactgaaatataccagttttggcttcccttctctattattcttcattgttattttgctcttctgtgtatatgtgggagaggaaagagcgttggatttccactttgcagcactcaacatttgcttggatcaagagatggtttactccatgtgaaatgcaagtcatttttataggccaattgaagaaacatttttttctgc

SEQ ID NO: 460 - protein, 59 aa, Homo sapiens
MLSAAKWKSNALSSPTYTQKSKITMKNNREGKPKLVYFSSFKKLKFEVKNIEQEVRCSE

SEQ ID NO: 461 - DNA, 258 bp, Homo sapiens
cgcgtaggtaaatatccggtcgagatcccgtcgggcgtcgaggtggcgatcgccggcggcaccctgacggcgaagggcaagctcggcgagctgtcgatgccgctgtcctcgcatgccgagaccaaggtcgaggacaacaaggtgtccgtcgcgccgcgcagcgaggccgcccaggcccgcatgatgtggggcaccacccgcgcgctggtcgcctccctggtgaagggcgtgtcgacgggttacagcaagacgctcgag

SEQ ID NO: 462 - protein, 86 aa, Homo sapiens
RVGKYPVEIPSGVEVAIAGGTLTAKGKLGELSMPLSSHAETKVEDNKVSVAPRSEAAQARMMWGTTRALVASLVKGVSTGYSKTLE

SEQ ID NO: 463 - DNA, 261 bp, Homo sapiens
ctcgagcaggatgccggcaaatctctgcacgaccagaacccgtcgcggtcgatgatcgacctcaaccgcgccggtgtcgcattgatggagatcgtcagcgagccggatatgaggtcgccgcaggaggccggagcgtatctgcgcaagctgcgcaccatcctgcgctacctcggcacatgtgacggcaacatggaggagggctccatgcgtgcggacgtcaatgtctcggtccgcaagacgggtgagccgtatcggacgcgt

SEQ ID NO: 464 - protein, 87 aa, Homo sapiens
LEQDAGKSLHDQNPSRSMIDLNRAGVALMEIVSEPDMRSPQEAGAYLRKLRTILRYLGTCDGNMEEGSMRADVNVSVRKTGEPYRTR

SEQ ID NO: 465 - DNA, 251 bp, Homo sapiens
acgcgttcagcgtcaagggcgtcgacatcgtcgccatcggctattccgaggtgctgggccacggcaaggtgttccacctcaaggatctggccgatttcaacggcacctatgtcgctggcaccggcgaggcgaccctcggcaccggtgtggcaggccagtggctgaccaacgagaagggcgtcgagatccatatcgacagcgtcaccaagggcgcgcagctcaaggcggcggcgggcggcatccggctcgag

SEQ ID NO: 466 - protein, 63 aa, Homo sapiens
MDLDALLVGQPLACHTGAEGRLAGASDIGAVEIGQILEVEHLAVAQHLGIADGDDVDALDAER

SEQ ID NO: 467 - DNA, 246 bp, Homo sapiens
  misc_feature (1)..(2): wherein any n is one of a or t or g or c
nnctcgagcttcctggcaggtgacgatctgatggcgaccagcccgcgttatgccgacatcgctcccgatctgcccgacgacgcggttctgtccgcgctgctcggccatcgctcggtgcgcgccttcaccgatgacgaggttgccgaaatcgaccttgccggcgccgtcgccgcggcccaatcggccgccacctcgtcgaacctgcaatgcttcagcgtcgtcgccgtgcgcgatcccgcgacgcgt

SEQ ID NO: 468 - protein, 82 aa, Homo sapiens
  VARIANT (1): wherein Xaa may be any one of Phe or Ser or Tyr or Cys or Leu or Pro or His or Arg or Ile or Thr or Asn or Val or Ala or Asp or Gly
XSSFLAGDDLMATSPRYADIAPDLPDDAVLSALLGHRSVRAFTDDEVAEIDLAGAVAAAQSAATSSNLQCFSVVAVRDPATR

SEQ ID NO: 469 - DNA, 270 bp, Homo sapiens
cgcgtgacgttgattggccattccatgggtggcaaagctgccatggccgctactttggatcctaagttacaggacgatgtactttctcatcttgtaagtgtggatatgtcgcctgccgaaggccctatctcgcgtgagttcatgcagtatgctgaatgcatggttgagatcgacaaaatgaatgtcaaaacacgaagcgaagcagatgaggtgctcaaaaaaattgagccatccgtggctgtgcgccagtttttgctcacgaatctcgag

SEQ ID NO: 470 - protein, 90 aa, Homo sapiens
RVTLIGHSMGGKAAMAATLDPKLQDDVLSHLVSVDMSPAEGPISREFMQYAECMVEIDKMNVKTRSEADEVLKKIEPSVAVRQFLLTNLE

SEQ ID NO: 471 - DNA, 659 bp, Homo sapiens
  misc_feature (145)..(319): wherein any n is one of a or t or g or c
tgatcataaaacccacttagagaaacaaacatgaacacctgagaaaaccctggagagtatcagaggggaatgggctgcccagacgttaaaattttctatacagcctctttaatgaaaatggtgtggtactggcataagaacaagnngacaggtgaatggaacagaatanaaaatccagaagcaaatcaggctgcctggggaagatccatgtagctcaaggcagcatgtaaatttcgtgctggaaaagatgaccttggttatcaatggtgttgggataactggatagcctcatggaaaaagatgaaagtcaggtcttctntcacacctttcacctggataagtaccagatggaccttttaggaatgtttactgaattctgcacgtgttaacagttctgtgctgtctggggtttgccttggattgatggtggtgggcagccgttgctggggatgcgggtgaaacgcggccggccgtgcaccaacgttgttgcagtcattgcaccgtttctgatgtttttgcactcgtttgaaatttctgatcagttttatattggttccataaatggccactgggtctccctcttcaaaggggtgtttgctctttattcctggattcgtggttgtccttaatgtgaatctctttccccgattcctgcgcga

SEQ ID NO: 472 - protein, 56 aa, Homo sapiens
  VARIANT (35): wherein Xaa may be any one of Leu or Ser or Trp or Pro or Gln or Arg or Met or Thr or Lys or Val or Ala or Glu or Gly
  VARIANT (43): wherein Xaa may be any one of Gln or Glu or Lys
ENPGEYQRGMGCPDVKIFYTASLMKMVWYWHKNKXTGEWNRIXNPEANQAAWGRSM

SEQ ID NO: 473 - DNA, 329 bp, Homo sapiens
ggccgatacggcatggccggagaattcggacatatgacggtggttcccgatggccactggtgcccatgtggcaaccgtggttgctgggagcaatacgcctctggaaattccctcgtgagggacgctcgagcgttgcttgccgagggagctcccggtgctcaggacctgttgggttatgtagctgaccgcaatcccgataacctcattggtcctgatgtcacacgcgcagcggtcgatggcgatcgtcttgctattgagctcattgcagacattggcatctggctgggccgtggaatggcgaacttggcagctgccttagatccagatct

SEQ ID NO: 474 - protein, 109 aa, Homo sapiens
GRYGMAGEFGHMTVVPDGHWCPCGNRGCWEQYASGNSLVRDARALLAEGAPGAQDLLGYVADRNPDNLIGPDVTRAAVDGDRLAIELIADIGIWLGRGMANLAAALDPD

SEQ ID NO: 475 - DNA, 394 bp, Homo sapiens
  misc_feature (1): wherein any n is one of a or t or g or c
nagatctatggggttccaagcgccaaactggcatggtatgccgaggcgactcgggtcggtaacgttcccccgacggtcttctggccagtgcccaatgtggattccgggttggtccggattacgcgacggcggtctccccacgtcgacgggcggaacccgcgcgtcacccgttcccaagtctttcgcgttgttgacgccgctttcgcctctcgccgcagaatgctgcgctcggccctggccgggttatgcggtggttcaatggcggcttccgagctcattaccgccgctggaattgacccgacggctcgtggcgaagccctcgatattggcgatctggcccgcgttgcagaggccctagcccaagctggtgctctcaacgcatcacgtcaagtgt

SEQ ID NO: 476 - protein, 131 aa, Homo sapiens
  VARIANT (1): wherein Xaa may be any one of Gln or Glu or Lys
XIYGVPSAKLAWYAEATRVGNVPPTVFWPVPNVDSGLVRITRRRSPHVDGRNPRVTRSQVFRVVDAAFASRRRMLRSALAGLCGGSMAASELITAAGIDPTARGEALDIGDLARVAEALAQAGALNASRQV

SEQ ID NO: 477 - DNA, 360 bp, Homo sapiens
  misc_feature (322)..(350): wherein any n is one of a or t or g or c
cggccgaggttgaagaggcttgtgatggggtctgagccggcagacgtcagtcagatgtgccgtgacctgctcagcactgccgtctctgagatgggtggtcaagagaggccgggccaagtcgcgatggctaaagctgtcgaccaagctatgcgagacaagctgcacttgttggtccaggccggcacaggaacgggaaagtccctcgggtacttggctccggcccctgtctattgcgtcgaaaaagggggcacagtcatcgtcgctaccgctacgcttgccttgcagactcagcttgcctacaaggatattccgaccatccttnacgcatctnataaaggtttgtctcgtangccccgaggt

SEQ ID NO: 478 - protein, 120 aa, Homo sapiens
  VARIANT (108): wherein Xaa may be any one of Asn or Asp or His or Tyr
  VARIANT (111): wherein Xaa may be any one of Asn or Asp or His or Tyr
  VARIANT (117): wherein Xaa may be any one of Arg or Ser
RPRLKRLVMGSEPADVSQMCRDLLSTAVSEMGGQERPGQVAMAKAVDQAMRDKLHLLVQAGTGTGKSLGYLAPAPVYCVEKGGTVIVATATLALQTQLAYKDIPTILXASXKGLSRXPRG

SEQ ID NO: 479 - DNA, 475 bp, Homo sapiens
agatctgtcaacaggggcaccttgctactcctcctcgtggtattttatcctctaggtggctaacatggactttattgatggagacagcagcattctgccgccggctgcaaacggactgcgctccaggtgggtggaaacgtccttctcctactttctgggctcactcggctccctgtgacgcgatcccgcttgcacccttgcccttcacgttgaccgcagtggctggtgggcagtgggggacaccctgggctccgcctgggttttctcttgctggtgacttgggccctggcgctcagtgtccctggtcgttagacaagggtgccttgagccacttgttgttcaggcggtttcttctttacagaaagtggccccccacacgcccttcctggtggcaggagcagggcagtgggcagcgtttctgccctgctccatggggctggggttggaggcggctctcccattcctgctgtccgga

SEQ ID NO: 480 - protein, 132 aa, Homo sapiens
METAAFCRRLQTDCAPGGWKRPSPTFWAHSAPCDAIPLAPLPFTLTAVAGGQWGTPWAPPGFSLAGDLGPGAQCPWSLDKGALSHLLFRRFLLYRKWPPTRPSWWQEQGSGQRFCPAPWGWGWRRLSHSCCP

SEQ ID NO: 481 - DNA, 439 bp, Homo sapiens
  misc_feature (1)..(2): wherein any n is one of a or t or g or c
nnagatctgtgaaggatgaggatggctgagcttattttccacaccggtccgatggactctggcaagtccaccctcgcactgcagatggaccatgcgcagtccgctcacgaccgccaaggggtgcgatacgcgatgcacgaccgctctggtggggctcggatcacctcgcggattggtctgagtgtcgaagctgtcgaggtcactgactccctggacctctaccaggacatcgtctcgcggttgagtcgcggaggacgaattgattacctcatttgcgacgaggcccagttctaccgaactaagcagatcgaccaactggctcgagtcgtcgatgacctcgacatcgacgtctactgcttcggaatcctggccgattttcggacagagctatttcccggatcaaaacgcctcgttgagttggccgaccgcgtcgttgagc

SEQ ID NO: 482 - protein, 139 aa, Homo sapiens
MAELIFHTGPMDSGKSTLALQMDHAQSAHDRQGVRYAMHDRSGGARITSRIGLSVEAVEVTDSLDLYQDIVSRLSRGGRIDYLICDEAQFYRTKQIDQLARVVDDLDIDVYCFGILADFRTELFPGSKRLVELADRVVE

SEQ ID NO: 483 - DNA, 393 bp, Homo sapiens
ggtaccgacgtccacgagctgttcctcagcaacttcttcgcccagaccgccgcgttggcgttcggtaagaccgccgacgaggtgcgtgccgagggcactgatgaggccattgtgcccgctcgggtctttgctggagaccgtccgacaacgtcaatcatggccgacgaactctccccgaaggtcctcggagaactcatcgctttgtacgaacacatcaccttcgtgcagggcgtcgtatggggtatcgattccttcgaccagtggggtgtcgagctcggcaagaagctcgccctgcagattgccccggcggtcagcggtgacgacgaggccctgggccacccagacccgtccaccccaggtctggtgacgtgggatcgcgagcatcggcggaga

SEQ ID NO: 484 - protein, 131 aa, Homo sapiens
GTDVHELFLSNFFAQTAALAFGKTADEVRAEGTDEAIVPARVFAGDRPTTSIMADELSPKVLGELIALYEHITFVQGVVWGIDSFDQWGVELGKKLALQIAPAVSGDDEALGHPDPSTPGLVTWDREHRRR

SEQ ID NO: 485 - DNA, 396 bp, Homo sapiens
  misc_feature (234)..(396): wherein any n is one of a or t or g or c
ggtaccttcttcactctgactgacggccacctcctttcagacaatttctttgcaagttatgtgcatctgggtccaccattctgcatgagggcgctgctgtatgactttcttccatgtgatgtgggttgggacttgttgggaatctccccacgtggtctctcatccgtccatggcttagcctgagcttctttacatgccagcaggaccccaagagactgaagcagaaggtctctntaggtctcataaccagcccataaacacatctgctcatntnnattggttaagcagggcacaaggccagctcanatactnatggctggaaaaacaacactaccttgatgggaggagctgcagaatattgtggctatnacttccaacacacctcagtagccgatn

SEQ ID NO: 486 - protein, 86 aa, Homo sapiens
  VARIANT (13): wherein Xaa may be any one of Arg or Ile or Lys or Thr
MSRCVYGLVMRPXETFCFSLLGSCWHVKKLRLSHGRMRDHVGRFPTSPNPHHMEESHTAAPSCRMVDPDAHNLQRNCLKGGGRQSE

SEQ ID NO: 487 - DNA, 438 bp, Homo sapiens
  misc_feature (1)..(435): wherein any n is one of a or t or g or c
ncgatcggcgtggcgcaggcctggctgaccagcgacaacgccatgaaaaacctgcgcatgatgctcaagaccaaccagaacggcggtttcgactgccctggctgcgcctggggcgactcgccggaaagcggcatggtcaagttctgcgagaacggcgccnaggcggtcacctgggaagccaccaagcgccgtgtggacgcggctttcttcgccaagcacagcgtgactgcactgctggagcagagtgactactggctggaataccagggccgcctgaccgagccgatgcgctacgacgccgagacagatcgctataaagccatcagttgggatgccgcctttgacctgatcggcaagcacctcaacgccctgccaagcccgggacatgccgagttctacacctcgggccgggcccagcacgaagcagcgtacctntac

SEQ ID NO: 488 - protein, 146 aa, Homo sapiens
  VARIANT (1): wherein Xaa may be any one of Ala or Pro or Ser or Thr
  VARIANT (54): wherein Xaa may be any one of Glu or Gln or Lys
XIGVAQAWLTSDNAMKNLRMMLKTNQNGGFDCPGCAWGDSPESGMVKFCENGAXAVTWEATKRRVDAAFFAKHSVTALLEQSDYWLEYQGRLTEPMRYDAETDRYKAISWDAAFDLIGKHLNALPSPGHAEFYTSGRAQHEAAYLY

SEQ ID NO: 489 - DNA, 361 bp, Homo sapiens
  misc_feature (289): wherein any n is one of a or t or g or c
agtactgtggtcccagtgggcctgttaattctcagactgttagtgcgtcttaaaatgtcttataaagcagggaaaggtacatttccgccatctgtaacaaagcaccttcgtgaaataagccacgagttaaaaagtaaaattgggattcctggaagagacgcctccgtgttagaggccgtcagagcacaggctttgaacaaaacttccggaacgtatgtgagtggctgtgatgctgcaggaccgtcggaagacaaataacttctctatctggttcctacctaataacctntacaataaagaggaaatcaaccttctccttgcctggctaccagagattaaacttactctgctaagatgatca

SEQ ID NO: 490 - protein, 67 aa, Homo sapiens
MSYKAGKGTFPPSVTKHLREISHELKSKIGIPGRDASVLEAVRAQALNKTSGTYVSGCDAAGPSEDK

SEQ ID NO: 491 - DNA, 247 bp, Homo sapiens
  misc_feature (1): wherein any n is one of a or t or g or c
ncggccgtgatacacggcgcaacgggcactgtgcgaaaccgacggggacgccgcccctcctgcggctggagcgcttccagagcagaggcgcatcgcagtgccgctcgccccggcgtcctcccttcagctccggctcctcctcccccttccagccccggctcctgcagccggctccaagaggcggcgggcgcgcctccccctccttggtctccccctcgtctcgctctctcgcggctaactttccgga

SEQ ID NO: 492 - protein, 82 aa, Homo sapiens
  VARIANT (1): wherein Xaa may be any one of Ala or Pro or Ser or Thr
XAVIHGATGTVRNRRGRRPSCGWSASRAEAHRSAARPGVLPSAPAPPPPSSPGSCSRLQEAAGAPPPPWSPPRLALSRLTFR

SEQ ID NO: 493 - DNA, 276 bp, Homo sapiens
  misc_feature (1)..(225): wherein any n is one of a or t or g or c
nngtgcacggtggcatgggctgcatctctangagcttgtgggaacctctgccgcctcgcccttgtcggcgtcaaccttccggcccagttggcggctggagttggtggcatagtcattggttttctcgcaagcccgctatcggtccgaaccaagttgccacgcattacattgacagttccggcctgcgtcatcatggtccccggcgcatcgatntaccgcactgtntactggcttaacggacaggatatgacgaaggcactgaccttcggcgtcgac

SEQ ID NO: 494 - protein, 92 aa, Homo sapiens
  VARIANT (1): wherein Xaa may be any one of Leu or Ser or Trp or Pro or Gln or Arg or Met or Thr or Lys or Val or Ala or Glu or Gly
  VARIANT (11): wherein Xaa may be any one of Arg or Gly
  VARIANT (71): wherein Xaa may be any one of Ile or Met
XCTVAWAASLXACGNLCRLALVGVNLPAQLAAGVGGIVIGFLASPLSVRTKLPRITLTVPACVIMVPGASXYRTVYWLNGQDMTKALTFGVD

SEQ ID NO: 495 - DNA, 299 bp, Homo sapiens
  misc_feature (15)..(299): wherein any n is one of a or t or g or c
gtcgaccagcaccanatcgatcactctctcgcgcgcgcaggccagcgcctcgactggatcgaggaaggtcgtggcctctacgaagccctccgcttcaatgtgacgtttcaggtagttgagaacagagcggctgtcatcaagcagaagcgcttgggtcagcatcggcgggcggactggttctgattgcgaatcatgacctcaacgaatatcccggtcgatttaacgcggagcanacatccgtgctgcgtcacgctgtctcaacgtttcgcgctgcgcattggatttgagcggctggtgcn

SEQ ID NO: 496 - protein, 54 aa, Homo sapiens
  VARIANT (50): wherein Xaa may be any one of Leu or Met or Val
MLTQALLLDDSRSVLNYLKRHIEAEGFVEATTFLDPVEALACARERVIDXVLVD

SEQ ID NO: 497 - DNA, 390 bp, Homo sapiens
  misc_feature (1)..(370): wherein any n is one of a or t or g or c
ngggttgatcagatctttaatcttatgcttgaggtttatacagtcttcacctttgatcagtcctatagaattttgaactagtatccaccggcgtgggccccaccaggtggatgtatccagtagctcgtacaactttgttcatctttcagcaagtgcagtanagctcttgggagtcttcttctcgaatctgggttgaggtggatcataactgcctttttgggaaggcggtacctgttgataacttcaggtatttggatggggagcttgtcttctaagttatggattggtttggaaatttggtgatcgagcttggtagttcgtgggggcattttggtatactagatntggacatgatagactgaaaggggtntttggtagctcacttgtaca

SEQ ID NO: 498 - protein, 83 aa, Homo sapiens
  VARIANT (57): wherein Xaa may be any one of
MPPRTTKLDHQISKPIHNLEDKLPIQIPEVINRYRLPKKAVMIHLNPDSRRRLPRAXLHLLKDEQSCTSYWIHPPGGAHAGGY

SEQ ID NO: 499 - DNA, 368 bp, Homo sapiens
  misc_feature (251)..(368): wherein any n is one of a or t or g or c
tgtacaccttgaaagggagagggcacactcttcccccccatttattccctccagcggtctagaacaaggacatgatggctggagcacagaaagccatcttgggaaatgaaaatgaagacaacaccgtggagagaaaggaagcgcctaggcggaatgtgggttccacagtcctagtggacagcaggccacagctagggactgcggcgcctatggatttctttagtgtaagagaaataaacctcagccatgtnttcaagccactgttcctttggaatntctactgcaaggatgccaacattatcctaaccagtatagtacatttagtntaagatgacactgttccacctccaatggagcaacaactgaan

SEQ ID NO: 500 - protein, 85 aa, Homo sapiens
  VARIANT (69): wherein Xaa may be any one of Ile or Leu or Phe or Val
MMAGAQKAILGNENEDNTVERKEAPRRNVGSTVLVDSRPQLGTAAPMDFFSVREINLSHVFKPLFLWNXYCKDANIILTSIVHLV

SEQ ID NO: 501 - DNA, 324 bp, Homo sapiens
  misc_feature (1)..(2): wherein any n is one of a or t or g or c
nnttgacaacctatgattctatttggacatatgtcaccattcatgattgtaggtatgattggtgcaattaaagcaggatgtggatatgtacctatcgatacgtcagtgccagaagaacgtgtgaagatgattatcgataaagtacaacctgaatatatctttaatacgactgattacacattagatcaacataacgctcaagttatcacaattgaaaacgttgagaattcacaagatcctgtaatttttgatagccaaatgaaggcgaatgacgttgtatatacaatctttacatcaggttctacaggcgaacctaaaggtgta

SEQ ID NO: 502 - protein, 106 aa, Homo sapiens
QPMILFGHMSPFMIVGMIGAIKAGCGYVPIDTSVPEERVKMIIDKVQPEYIFNTTDYTLDQHNAQVITIENVENSQDPVIFDSQMKANDVVYTIFTSGSTGEPKGV

SEQ ID NO: 503 - DNA, 318 bp, Homo sapiens
  misc_feature (1)..(2): wherein any n is one of a or t or g or c
nntgtacatgttgtgactgtcaacgattatctggcgcagcgcgatgccggctggatggggcagatttatgatgcgctaggtttatcgaccggtgtgatcatcaatgaggcttcattcttgtacgacgaaaattatgacaatgaggcgcatactgatccgcgcatgaagaagcttcgcccgtgcacccgtaaagaagcttaccaggcagatattacctatggtactaataatgaattcggctttgattatttgcgcgacaatatggttaacgatatcgagctggtgcgccagcgcgatttgaattttgcgattgtcgac

SEQ ID NO: 504 - protein, 106 aa, Homo sapiens
  VARIANT (1): wherein Xaa may be any one of Phe or Ser or Tyr or Cys or Leu or Pro or His or Arg or Ile or Thr or Asn or Val or Ala or Asp or Gly
XVHVVTVNDYLAQRDAGWMGQIYDALGLSTGVIINEASFLYDENYDNEAHTDPRMKKLRPCTRKEAYQADITYGTNNEFGFDYLRDNMVNDIELVRQRDLNFAIVD

SEQ ID NO: 505 - DNA, 162 bp, Homo sapiens
  misc_feature (1): wherein any n is one of a or t or g or c
ntgatcacccccctgcagcccgagcacgtcctggtgggccagaacttccgcttcgggcgtcacgccgtgggcaccccgcaggccctgtccgagattggccatggccgcttcgaggttcatgccatggatctcgtcgccatgtccggtgtcacggtgtcgtcg

SEQ ID NO: 506 - protein, 54 aa, Homo sapiens
  VARIANT (1): wherein Xaa may be any one of Leu or Met or Val
XITPLQPEHVLVGQNFRFGRHAVGTPQALSEIGHGRFEVHAMDLVAMSGVTVSS

SEQ ID NO: 507 - DNA, 434 bp, Homo sapiens
  misc_feature (411): wherein any n is one of a or t or g or c
gtcgacgagctcaagcaactggggttcagcatccaactggtgccggatgccgcggcccataacagccatgtcatcgccaccctcaaaggcaccggcaaggccaggatcctactgatggcccacattgacaccgtgttcaaggaagggtcggcggctgcccgaccgttccacatcaaggacgggcgcgcctattgccccggcgttatggattacaagggcggcatcgtcgctggcatctacgccttgaaagtccttaaaaaccagggcttcaaggactacgcgcaaatcaccttcctgctggacgccagcgaagaaaccggcaccgacggggcgtccgagctgatccgcaacaccgccaagggccacgacgttaccctcaatcttgaaccgggtctcccttcggattgcttngtggtttggcgcaaaggcagcgc

SEQ ID NO: 508 - protein, 144 aa, Homo sapiens
  VARIANT (137): wherein Xaa may be any one of Leu or Phe
VDELKQLGFSIQLVPDAAAHNSHVIATLKGTGKARILLMAHIDTVFKEGSAAARPFHIKDGRAYCPGVMDYKGGIVAGIYALKVLKNQGFKDYAQITFLLDASEETGTDGASELIRNTAKGHDVTLNLEPGLPSDCXVVWRKGS

SEQ ID NO: 509 - DNA, 236 bp, Homo sapiens
gaattctatgacacacttgtttccaagaactggagaactgcttaatgagaaggaaaaacccacacacgtgtgaggtgtggagcgtaagctgccattttccttcacctcccgcccttgatgtcaacactgtcatcttcagggtagtgttctggccggcatgtctgctcagccacctgtccccaccttcagggcaggacacttccccatgcctcaagtttggacacatgctcacgcgt

SEQ ID NO: 510 - protein, 75 aa, Homo sapiens
MCPNLRHGEVSCPEGGDRWLSRHAGQNTTLKMTVLTSRAGGEGKWQLTLHTSHVCGFFLLIKQFSSSWKQVCHRI

SEQ ID NO: 511 - DNA, 445 bp, Homo sapiens
gcgccgcctgcctcatcatgtccgatcccatgctcggactcttggccaccagcgcgttcatcttctccagcggctacgtggcgttcctgcaccgccccagcgtgctcgccggcccctggaccctcggtgggctcacccttggatacctggcgcttcagatctggtcccacgaccccgtcctggccgcctgtgccgtggtgatcatcgtgctgctcaacgccttcgtgttcttcacctgccgcgtggcaatcgggttgagctccacggacatccaccacagtgagatcgaaccgctgaccggcatgctcaacacggacggcctgtattcacgcgccgcgaacctgctcgccgcccggaaccggcaggacgaccgtcacatggtgctggccgtcgtcagcatcgacagctttcccctgctgtcgtccatgtccggtccccggcgcgc

SEQ ID NO: 512 - protein, 66 aa, Homo sapiens
APPASSCPIPCSDSWPPARSSSPAATWRSCTAPACSPAPGPSVGSPLDTWRFRSGPTTPSWPPVPW

SEQ ID NO: 513 - DNA, 504 bp, Homo sapiens
  misc_feature (1)..(40): wherein any n is one of a or t or g or c
nntgaaggtgttcctaaacaaagcgtacccggctttgacnacaacaccctgcaagtgcgtgatcccagcggcgagacgctgtcgctggaaaccgaccaggtgctggttgccgttggtcgcaaacccaacacccaaggctggagcctcgaagccttgaacctggacatgaacggctcggcgatcaggatcgacagccgttgccagaccagcatgcgcaacgtgtgggccatcggcgacctcagcggtgagccgatgctcgcccaccgcgccatggcccagggcgaaatggtggccgaactgatcagcggtaaatcccgcgaattcaacccggccgcaatcccggcggtgtgcttcaccgacccggaactggtggtggtcggcaagaccccggacgaggccaaggcggccgggctggactgcatcgtgtcgagcttcccgttcgccgccaatggccgggccatgaccctggagtcgaaaaccggcttcgtgcgggtagtggcgcgc

SEQ ID NO: 514 - protein, 168 aa, Homo sapiens
  VARIANT (1): wherein Xaa may be any one of Phe or Ser or Tyr or Cys or Leu or Pro or His or Arg or Ile or Thr or Asn or Val or Ala or Asp or Gly
  VARIANT (14): wherein Xaa may be any one of Asn or Asp or His or Tyr
XEGVPKQSVPGFDXNTLQVRDPSGETLSLETDQVLVAVGRKPNTQGWSLEALNLDMNGSAIRIDSRCQTSMRNVWAIGDLSGEPMLAHRAMAQGEMVAELISGKSREFNPAAIPAVCFTDPELVVVGKTPDEAKAAGLDCIVSSFPFAANGRAMTLESKTGFVRVVAR

SEQ ID NO: 515 - DNA, 370 bp, Homo sapiens
ctcgagcaccgcaacgatgtcggggtgctggtcctgaccggggaaggcactgcctggaccgccggcatggatctgaaggagtatttccgcgagaccgaggcgacgggtctgggcggcacgcgcaaggcgcagcgcgagagctacggctggtggcgtcggctgcgctggtatcagaagccgaccatcgcgatgatcaacggctggtgcttcggcggtggctatggtccgctgttcgcatgcgatctggcctatgccgccgaggatgcccagttcggcctgtcggagatcaactggggtatcctgcctggcggtggcgcgaccaaggtcgccgtcgaactgacgtcgttccgcaacgcgatgtatcacgcgt

SEQ ID NO: 516 - protein, 123 aa, Homo sapiens
LEHRNDVGVLVLTGEGTAWTAGMDLKEYFRETEATGLGGTRKAQRESYGWWRRLRWYQKPTIAMINGWCFGGGYGPLFACDLAYAAEDAQFGLSEINWGILPGGGATKVAVELTSFRNAMYHA

SEQ ID NO: 517 - DNA, 359 bp, Homo sapiens
tcgcgatttgaacttgagccggccacgtgcagggaccccatgtgcaccggggaccatggctacaccgggactttcagcggagatgacattgtcatcaggatgagcccagcggccgacggccccgaccaggttgaacgcctgatggctttcgcgacgcggatgcaggccgtcaccggggcagcccgatgagtccctttctcgctgccgacctcatgccgccaggccctgagaccctttctgatcttgtgcccgcgatgggtaaggcgctaacaggcggagcgctgactggtctggggctgccttacgcgacgcggtacgtactcctgctggttgatgggatgggccgggagaaactcgag

SEQ ID NO: 518 - protein, 62 aa, Homo sapiens
SRFELEPATCRDPMCTGDHGYTGTFSGDDIVIRMSPAADGPDQVERLMAFATRMQAVTGAAR

SEQ ID NO: 519 - DNA, 360 bp, Homo sapiens
  misc_feature (1)..(2): wherein any n is one of a or t or g or c
nnctcgagaccttgcctggcgtggtctatcagaccgccgatccgtgggggaacaacgagcagaacatcacgctgtatatccacggcttcaatgctcagcagctcggctacacgctcgacggcgtgccgctcggcgaccagagctacggcaattacaacgggctctcgccacagcgcgcagtgatcagcgagaacgtgggccaggtgacgctgtcgtcgggcgcgggcgatctcggcacggcgtcgacctcgaatctcggcggcaccatcgacaccttcaccagcgaccccaggcaccgtttcggcggcacggtcggacagaccttcggctcgttctcgaccttccgcaccttcgcacgcg

SEQ ID NO: 520 - protein, 60 aa, Homo sapiens
  VARIANT (1): wherein Xaa may be any one of Phe or Ser or Tyr or Cys or Leu or Pro or His or Arg or Ile or Thr or Asn or Val or Ala or Asp or Gly
XSRPCLAWSIRPPIRGGTTSRTSRCISTASMLSSSATRSTACRSATRATAITTGSRHSAQ

SEQ ID NO: 521 - DNA, 489 bp, Homo sapiens
ccgttcctccacgtcaacggagatgacccggcatcggtggtccacgcggctcgtatcgcctacgagtaccgccagaccttccatcgcgatgtcgtcgttgacgtggtgtgctatcgccggcgcggccataacgagggtgacgatccgagcttcacacagccgcacatgtacggcctcatcgcggaaaagcgctcgacccgcaagctctacaccgagagcctcatcggtcgtggcaatatcgctaccgaggacgccgaggctgtgatgacaaagttccgctctcgtctggagacagtgttcaaggaggttcgcgaggccacctcgacgcctgagccctatagcggtgtgccagactacccggtcaagcacagtggcctgcaccagaccaaggtcgagcctgacacaatggaggctgtcgccagggctcatgagaatctgccagaaagctccaatgctcaccccaaggtcgccccacagatgacacggcgc

SEQ ID NO: 522 - protein, 163 aa, Homo sapiens
PFLHVNGDDPASVVHAARIAYEYRQTFHRDVVVDVVCYRRRGHNEGDDPSFTQPHMYGLIAEKRSTRKLYTESLIGRGNIATEDAEAVMTKFRSRLETVFKEVREATSTPEPYSGVPDYPVKHSGLHQTKVEPDTMEAVARAHENLPESSNAHPKVAPQMTRR

SEQ ID NO: 523 - DNA, 523 bp, Homo sapiens
  misc_feature (1)..(2): wherein any n is one of a or t or g or c
nnggcgccagccgagcgggcgatgatcaaccacggcttaaaggccgtgcagatcggcaccagcgcctggaccgccgaagccctgaaaaacaccatgccggccagcgtgttctcgcgctccaccgagtgccacaaccaggacaaggtgagcatgggcaccatcgccgcccgcgatgcgattcgtgtgctggaactgaccgagcaagtcgccgccgccaccttgctcgccgctaatcagggcgtatggctgcgggcccaggctgaagacgcgcgcccgctgcccccggcgctggccgccatgcacatcgagctggccaaagacttcccgccggtcatcgaagaccgcgccctggaaggcgaactgcgcctgtgcctcaagcgtattgccgagcaacactggaggctgcatgcgtagccccggcgtgttgcactgcgacactgaaatcctcgtgccgtttttcgacatcgacaccatgaacgtggtgtggcacgggcactacgtgaagtacctggaagtcgccggc

SEQ ID NO: 524 - protein, 137 aa, Homo sapiens
  VARIANT (1): wherein Xaa may be any one of Leu or Ser or Trp or Pro or Gln or Arg or Met or Thr or Lys or Val or Ala or Glu or Gly
XAPAERAMINHGLKAVQIGTSAWTAEALKNTMPASVFSRSTECHNQDKVSMGTIAARDAIRVLELTEQVAAATLLAANQGVWLRAQAEDARPLPPALAAMHIELAKDFPPVIEDRALEGELRLCLKRIAEQHWRLHA

SEQ ID NO: 525 - DNA, 479 bp, Homo sapiens
accggtgcgctgccccagattgctcgacttgctggcatgcgctggttctttacccagaaacttagctggaacacggcgaatacccttccccaccacaccttctggtgggagggcatcgacggcacccggatctggacgcactttccgccagtggactgctacgactgtgttgtcagcgcccaagaggtcaagaaagctgaggcaaacttcaaagagaagggcgtggctcgacgctcaatcctgccattcggatacggcgacggcggcggtggacctaccgccgaacaagtggaacgcgcacgcaggttcgccgacctggaggacgcgccgcaggtgcggctgggctctccggacgactacttcgaccaggcgcaggaggaccacccacaggcgccagtgtggcgcggcgagatgtacttggagttccaccggggcgtctacacctccgcccacctcctcaagaacggcaaccggcgcgc

SEQ ID NO: 526 - protein, 159 aa, Homo sapiens
TGALPQIARLAGMRWFFTQKLSWNTANTLPHHTFWWEGIDGTRIWTHFPPVDCYDCVVSAQEVKKAEANFKEKGVARRSILPFGYGDGGGGPTAEQVERARRFADLEDAPQVRLGSPDDYFDQAQEDHPQAPVWRGEMYLEFHRGVYTSAHLLKNGNRR

SEQ ID NO: 527 - DNA, 464 bp, Homo sapiens
  misc_feature (1)..(2): wherein any n is one of a or t or g or c
nngcgcgccatccagaccaatgatggttccgaaggggtgcaccttgacctccacgtcgatccgcacggatactggccgaccatgctcggtcgcattggcgtgacaatcggcctgcccgcagaatggaccaccgtttcatggtttggcctctggccgaccgagaactatcccgattctcagcacgccgccatctggggacgctggaatggagaggtggatgacctgcaaaccccctatgtcatgccccaggagaacggccttcgccagggagtccacgaactgacgatcagcggttcgaacggcggcctgcggatcactgcagacggtagctggccggcattcgcggcccggccggtggcttcacaggccttgctgactgccgcccataccttggacctgaagcccgacgggcacacctggcttaccttggacgccgtgtagccccgcttggatcgacgtcctgc

SEQ ID NO: 528 - protein, 146 aa, Homo sapiens
  VARIANT (1): wherein Xaa may be any one of Leu or Ser or Trp or Pro or Gln or Arg or Met or Thr or Lys or Val or Ala or Glu or Gly
XRAIQTNDGSEGVHLDLHVDPHGYWPTMLGRIGVTIGLPAEWTTVSWFGLWPTENYPDSQHAAIWGRWNGEVDDLQTPYVMPQENGLRQGVHELTISGSNGGLRITADGSWPAFAARPVASQALLTAAHTLDLKPDGHTWLTLDAV

SEQ ID NO: 529 - DNA, 285 bp, Homo sapiens
  misc_feature (1)..(2): wherein any n is one of a or t or g or c
nnctcgagcagttcggacaacaacaccattcttccatcgggtgcccaggtcgggctgggggtcaagaccgctgccgtctatcgcatcaacgagcagggaaacctgcaacagacgtccaacagcctggacgtcgcgatccagggcaacggctatttccagatcacgctgccctcgggcgataccgcctacacacgggacggaaccttcggtcttgccgccgatggaacgatcgtgacctccaacggctatgccgtcgctccgggcatcgtcgtgccggccaacgcg

SEQ ID NO: 530 - protein, 95 aa, Homo sapiens
  VARIANT (1): wherein Xaa may be any one of Phe or Ser or Tyr or Cys or Leu or Pro or His or Arg or Ile or Thr or Asn or Val or Ala or Asp or Gly
XSSSSDNNTILPSGAQVGLGVKTAAVYRINEQGNLQQTSNSLDVAIQGNGYFQITLPSGDTAYTRDGTFGLAADGTIVTSNGYAVAPGIVVPANA

SEQ ID NO: 531 - DNA, 286 bp, Homo sapiens
acgcgttgttctggaagttgcagtacagcggcgaggcggagaagtccgacaggaacgacatgcggccggccgcgatgtcgagacggccatgggcgaccgtctcctggccgtaccagaacacctgatggtaggcgacattgccgccggcgccatagatttcctggctggggttgaggttgtcgccgaacatgcggctcgccggtatgccgtagcggccgacggcgaccgtatgcgtcgagaacccggtgatgccggcaagacgttcccagtcgatatcggtctcgag

SEQ ID NO: 532 - protein, 66 aa, Homo sapiens
MGDRLLAVPEHLMVGDIAAGAIDFLAGVEVVAEHAARRYAVAADGDRMRREPGDAGKTFPVDIGLE

SEQ ID NO: 533 - DNA, 300 bp, Homo sapiens
  misc_feature (1)..(2): wherein any n is one of a or t or g or c
nnacgcgtcgtcgaatggctgcgacaattcgcgaccctggtgccctatgaacacaaggtgctggcggaagtgacgccgtcgctgctggtgccgctgccggtcaaccggcgtaccgtcgaggccgtgttcaacacccgcctggcggatgcggccgagacgcaggcgtttctcgcaagcctcgccgagccgatcgccgagccggccaacgcggccgaatatctgtatggccggatcggccgacgactgaccgacctgttcttccggccctacacgaagaagatgtgggagatggatctcgag

SEQ ID NO: 534 - protein, 100 aa, Homo sapiens
  VARIANT (1): wherein Xaa may be any one of Ala or Arg or Glu or Gln or Gly or Ile or Leu or Lys or Pro or Ser or Thr or Val
XRVVEWLRQFATLVPYEHKVLAEVTPSLLVPLPVNRRTVEAVFNTRLADAAETQAFLASLAEPIAEPANAAEYLYGRIGRRLTDLFFRPYTKKMWEMDLE

SEQ ID NO: 535 - DNA, 300 bp, Homo sapiens
  misc_feature (28): wherein any n is one of a or t or g or c
acgcgtgagacaacgcatgactcccctncaggattggcgagcaagttcgcttgtcgggcgtggctgcatgcattagcaactttgttccctccggacggggtccggctttcaggatcgggatcgatgacgggttttaacgtagctgtggtgggcgcgaccggcgcggtggggcgcgagatgctgcgcactctagcgcagcgcgagtttcccatccgcgagatcaccgcgctggcctcgccgcgctcggccggccaggaggtcagcttcggcgagcgcacgctcaaggtgcgcaatctcgag

SEQ ID NO: 536 - protein, 100 aa, Homo sapiens
  VARIANT (10): wherein Xaa may be any one of Ala or Pro or Ser or Thr
TRETTHDSPXGLASKFACRAWLHALATLFPPDGVRLSGSGSMTGFNVAVVGATGAVGREMLRTLAQREFPIREITALASPRSAGQEVSFGERTLKVRNLE

SEQ ID NO: 537 - DNA, 291 bp, Homo sapiens
acgcgtgtccggcgtccgccgtcaggaggctgtacatgctcgattggagtaggcatggggcaggtcagtgagcctggcgggactgaggatgcccatccgcgcgggccgcgtgccggcgccgtcgatgtgcatgtcggcaatcgcatcaagctgcgtcggacgctgctgggaatgtcccaggaacgcctcggcgaggcgctggggctgaccttccagcaggtccagaaatacgaacgcggcgtcaaccgggtcagcgcgtcgcgtctgttcgacatcgcccgcgtcctcgag

SEQ ID NO: 538 - protein, 97 aa, Homo sapiens
TRVRRPPSGGCTCSIGVGMGQVSEPGGTEDAHPRGPRAGAVDVHVGNRIKLRRTLLGMSQERLGEALGLTFQQVQKYERGVNRVSASRLFDIARVLE

SEQ ID NO: 539 - DNA, 289 bp, Homo sapiens
ctcgaggatgccgagatcgacctccgagccgtggaagcagaacaggttcgccgccgtcgccatcgcggccatctgctggaacctggccagcccgccgttgaaattgaagccgtcgacggcgcgatgcgcgatcaggttcggcacgtcatggacgcgctggccctgatagacataaggcagcgagacgtgctgggtgatcgggatcgaggagaaccagcgcaggtccgcatagtcctgcagcatccatttcgggatcggatcctcaagcagcagcgtgttgccgacgcgt

SEQ ID NO: 540 - protein, 81 aa, Homo sapiens
MLQDYADLRWFSSIPITQHVSLPYVYQGQRVHDVPNLIAHRAVDGFNFNGGLARFQQMAAMATAANLFCFHGSEVDLGILE

SEQ ID NO: 541 - DNA, 411 bp, Homo sapiens
tacaactattcggagactgccgcagatcctgttcatgttgagcgtgtttccacagaaaaggtacgttctgccgcgaaagatgccctcaccactatgtacaacgtggagcaacctactggtcccacgtatccaaccctagaagcggaagaaatgaccccgctccgtggtgtggctcgtgcaattgcccgcaacatgaacgcttcccgcgatattcccatggcgacctcggtgcggtctatccccgcaaagttgatgatagagaaccgtcttctcattaatagttatcttgcgaaaacgcgcggcgggaaggtctctttcactcaccttattggctacgccatgattcaagctataaaagcgtatctgaatatgaactgccgtctggaagaaaaagatgggcatttcacgcgt

SEQ ID NO: 542 - protein, 137 aa, Homo sapiens
YNYSETAADPVHVERVSTEKVRSAAKDALTTMYNVEQPTGPTYPTLEAEEMTPLRGVARAIARNMNASRDIPMATSVRSIPAKLMIENRLLINSYLAKTRGGKVSFTHLIGYAMIQAIKAYLNMNCRLEEKDGHFTR

SEQ ID NO: 543 - DNA, 446 bp, Homo sapiens
gcgtggattcgtcctggcggcgtcgctaccgacctgcccgagaccgggctcgaccagttgcgtgacctcatcaagcggatggaaaagtacctccccgagatcggtcagttctgcaatgagaatccgatctttaaggcccgcactcagggcattggttacgctgatctgtctacctgtatggccctgggagttactggtcctgctctgcgcgctaccggcctgccgtgggacctgcgcaagacccagccctattgcgattacgacacgtatgacttcgacgtcgccacctgggatacctgtgactgttacgggcgtttccgcatccgcctggaagagatggaccagtcggtgcgcattctcaagcaatgcctcaaacgcctcgaggacacccagggtgaccgtcatatggtcgaggacccgcacatcgcatggccggctgagctagc

SEQ ID NO: 544 - protein, 148 aa, Homo sapiens
AWIRPGGVATDLPETGLDQLRDLIKRMEKYLPEIGQFCNENPIFKARTQGIGYADLSTCMALGVTGPALRATGLPWDLRKTQPYCDYDTYDFDVATWDTCDCYGRFRIRLEEMDQSVRILKQCLKRLEDTQGDRHMVEDPHIAWPAEL

SEQ ID NO: 545 - DNA, 336 bp, Homo sapiens
ccgcggggagattgggtggtctatcggcgacctattccatgttgccgaatttcttggtgtagaggtcagtactctgctgcccgcacggggtagaaaaatccccgccaaccctgaagctgacggggaactggtagcggggacaggatttgaacctgtgacctccgggttatgagcccggcgagctaccgaactgctccaccccgcgtcggctcgcttcactatacagatcacactgttgcagtacaaatcagatgtgggaaagcccgaccgaaaagccaatggtggtgggtactcattctcgggcgccctaccacactgatctcgaggggttcgcgt

SEQ ID NO: 546 - protein, 56 aa, Homo sapiens
MSPASYRTAPPRVGSLHYTDHTVAVQIRCGKARPKSQWWWVLILGRPTTLISRGSR

SEQ ID NO: 547 - DNA, 257 bp, Homo sapiens
tgtacataaggctcccagaatacctaccccgcctggttgggccctggtggacagtgcaacgattgggccatggagaacttcaacaacgatccttttgcgtgtattgatcacgtcggttttgccgtcaaggacatggacgaggccatcaagtaccactgcgacgtgctgggcttccgggtgctcttccgtgagaagaacgagggacatggcgtcgaggaggccatgctcggcaccggcaaacgcggcgaggagtcgac

SEQ ID NO: 548 - protein, 62 aa, Homo sapiens
MENFNNDPFACIDHVGFAVKDMDEAIKYHCDVLGFRVLFREKNEGHGVEEAMLGTGKRGEES

SEQ ID NO: 549 - DNA, 246 bp, Homo sapiens
cgcgccgatctcgacctgcagggcggcaagcaggaccagtatgccggcacgttcggcggcaccaacttcatcgagtaccttgccagcgaccgcgtcatcgtcaatccgctgcgcgtgccggaagcggtccgccacgaaatcgagacctcgctggtgatcgcgttctcgggggtctcgcgcatgtcggcgaccatcatcgccgagcagcgcagcggcctgatcgccgcctccgacctcgcgctcgag

SEQ ID NO: 550 - protein, 82 aa, Homo sapiens
RADLDLQGGKQDQYAGTFGGTNFIEYLASDRVIVNPLRVPEAVRHEIETSLVIAFSGVSRMSATIIAEQRSGLIAASDLALE

SEQ ID NO: 551 - DNA, 324 bp, Homo sapiens
ctcgagcgcaggatcgccgccactgcccgcgaggagggcgaatgggcccgcaaggccgagctggcgctgacccataaccgtgaggacctcgcccgcggcgcgctggccgccaagggccatgtgaccaagacccgcgagacgctggaagaccagctcatccagatccgtcagggcctcgcacagcaggacgacgacatcgccaggttgcaggccaagctcgccgatgccaagacccgcgagcaggcgttgcgctcacggcacgatctggcaaattcgcgcctcaaggtgaaggaatcgctctacgattcacgcatcaacgacgcg

SEQ ID NO: 552 - protein, 108 aa, Homo sapiens
LERRIAATAREEGEWARKAELALTHNREDLARGALAAKGHVTKTRETLEDQLIQIRQGLAQQDDDIARLQAKLADAKTREQALRSRHDLANSRLKVKESLYDSRINDA

SEQ ID NO: 553 - DNA, 228 bp, Homo sapiens
  misc_feature (180): wherein any n is one of a or t or g or c
cgagtcctggattcgcgggtatgcgaagacggtactgcgatccgtcgaaggcggcagtgcccgatgtgtgagcgacggtttacgaccatcgaacgcatgcagatgacggttcacaagcgcaacggtatcgaggagcccttctcccgtgacaaggtgatccgtggtgtgcgcaacgcatgnaagggacgcccggttacagatgccgatctagctttgctgggacaacgc

SEQ ID NO: 554 - protein, 76 aa, Homo sapiens
  VARIANT (60): wherein Xaa may be any one of Cys or Trp
RVLDSRVCEDGTAIRRRRQCPMCERRFTTIERMQMTVHKRNGIEEPFSRDKVIRGVRNAXKGRPVTDADLALLGQR

SEQ ID NO: 555 - DNA, 327 bp, Homo sapiens
cgcgtgccaggtatgtcaactgatctgtcggatatttccgaggttgagtaccgtcaactgaggctggaacgagtggtgctgtgttcggtgtggactcagggaactgccgcagacgccgagaacgctatggcggagctgaaagcccttgctgaaacggcgggatctcaggtactcgaagctgtcatgcaacgtcggactaccccggatccggcgacgtacattggttcgggcaaggtggctgagcttgccgaggtggtgcgggcgactggtgccgatactgtcatttgtgacggtgaacttgacgccgctcagttgcgcaacctcgag

SEQ ID NO: 556 - protein, 109 aa, Homo sapiens
RVPGMSTDLSDISEVEYRQLRLERVVLCSVWTQGTAADAENAMAELKALAETAGSQVLEAVMQRRTTPDPATYIGSGKVAELAEVVRATGADTVICDGELDAAQLRNLE

SEQ ID NO: 557 - DNA, 345 bp, Homo sapiens
ctcgagcgggcccaggccataggcccttacatccggattgagttgcagataggtctcggcgttccagtgcaccaggccgcgcggcgaagccaacatggtctgctgccagggcttgtcgggatcggccatgatcctgagctcgttgtcgtagatcgagccgtattcttccgcactgagcagcagatcggcgatcaggtgattgcccggcaccatcggatcgctcgcatagcgccgcagggccgccggatcggtgcagctcgcatagggctcggccagcttcatccgagccttgcgccacagctcagacagctcggcattgtggaaatgcagataggtgaaacgcgt

SEQ ID NO: 558 - protein, 94 aa, Homo sapiens
MKLAEPYASCTDPAALRRYASDPMVPGNHLIADLLLSAEEYGSIYDNELRIMADPDKPWQQTMLASPRGLVHWNAETYLQLNPDVRAYGLGPLE

SEQ ID NO: 559 - DNA, 309 bp, Homo sapiens
gcgttcgacttcttcatcatggtgttcgtcttcgacgaggtcgccaagaccttcggcgtctccgaatcgttgggtgccacggcggtgacgatcacgctggcctgccgcgtattcggcgccttcatcttcggccgcatcgccgaccgctacgggcggcggctgacgctgatgatcaacatcttcacctacgcggccctcgaattcctctccggcgtcgcgccgaccttctgggtgttcatggtcctgcgcggcctctacggcgtcgcgatgggcggcgaatggggcatcggcgcctcgctcgcgctcgag

SEQ ID NO: 560 - protein, 103 aa, Homo sapiens
AFDFFIMVFVFDEVAKTFGVSESLGATAVTITLACRVFGAFIFGRIADRYGRRLTLMINIFTYAALEFLSGVAPTFWVFMVLRGLYGVAMGGEWGIGASLALE

SEQ ID NO: 561 - DNA, 345 bp, Homo sapiens
  misc_feature (1): wherein any n is one of a or t or g or c
nagatctacgacatcaccaaggttgatggttccgacaaccttccgtatagcctcaaggttctgcttgagaacctgttacgcaccgaggatggcgccaacatcacggccgagcagatcactgaactaggtcattgggacgccgaagcccagccgtccaaggagatccagttcactccggcccgcgttattatgcaggacttcaccggcgtgccttgtatcgtcgacttggccaccatgcgcgaggctgttgccgacctcggtggtgatcctcgcaaggtcaacccactgtcaccggccgagatggtcattgaccactccgtcatcgttgagcgctttggcactccg

SEQ ID NO: 562 - protein, 115 aa, Homo sapiens
  VARIANT (1): wherein Xaa may be any one of Glu or Gln or Lys
XIYDITKVDGSDNLPYSLKVLLENLLRTEDGANITAEQITELGHWDAEAQPSKEIQFTPARVIMQDFTGVPCIVDLATMREAVADLGGDPRKVNPLSPAEMVIDHSVIVERFGTP

SEQ ID NO: 563 - DNA, 412 bp, Homo sapiens
  misc_feature (1)..(2): wherein any n is one of a or t or g or c
nntggccaccaggaccgtgggccgcgtcagggtggcggccgtgacgacgatcgccgtggcggcaagcaagaaagccgaaggcgagggcaagcgcaagtacaagtgacccgggttgattcactcaccggggtccgtgctctcgccgctttgctggtggtgctgacccacgcggcattcacgacgggtaagtacacgcagaactacgtcgggttgatgtactcgcgcgccgagatcggcgtgccgatcttcttcgtgctgtcgggcttcctgctcttcaccccgtgggtgaaggcgttgactcgtaccgatgccgaaaagccttacgaggcaccatcggtgcggcggtacgcctggcaccgggtccgacggatcatgcccgcttacgtggtcacggtgttggcggcctacgcgt

SEQ ID NO: 564 - protein, 137 aa, Homo sapiens
  VARIANT (1): wherein Xaa may be any one of Phe or Ser or Tyr or Cys or Leu or Pro or His or Arg or Ile or Thr or Asn or Val or Ala or Asp or Gly
XGHQDRGPRQGGGRDDDRRGGKQESRRRGQAQVQVTRVDSLTGVRALAALLVVLTHAAFTTGKYTQNYVGLMYSRAEIGVPIFFVLSGFLLFTPWVKALTRTDAEKPYEAPSVRRYAWHRVRRIMPAYVVTVLAAYA

SEQ ID NO: 565 - DNA, 377 bp, Homo sapiens
  misc_feature (1)..(2): wherein any n is one of a or t or g or c
nngcccaccccggcatcgcattggcccggcaacgatgtgcgtggcgagattttcaagctcggttccacccggccctcggtggccgaggtcgcggcaaagttagcaataccactcggtgttgcgcgtgtgctgatcggcgacctcgtcacgcagggttatcttcaagtacacgccacgctcggcacaacgacgagcatcgacgaccggcgtgacttgatcgggaggacactgcgtggcctacgggctctctaatcggcacgcccccgcgtcgacgaagatcgtcatctcgggtgggttcggtgccggtaagacgacgttcgtcggcgcggtctccgagatcatgccgctgcggaccgaggccatcgtcaccaacgcgt

SEQ ID NO: 566 - protein, 83 aa, Homo sapiens
  VARIANT (1): wherein Xaa may be any one of Leu or Ser or Trp or Pro or Gln or Arg or Met or Thr or Lys or Val or Ala or Glu or Gly
XPTPASHWPGNDVRGEIFKLGSTRPSVAEVAAKLAIPLGVARVLIGDLVTQGYLQVHATLGTTTSIDDRRDLIGRTLRGLRAL

SEQ ID NO: 567 - DNA, 425 bp, Homo sapiens
gaccacgaccgtcgtcgcgcagacatcgcgcgtgtcaccttggacctactcgccgaaggcggagtgactgcggtcaactttcgggcaatcgccgagcggctgggtggatctactacgatcgtcacccactactaccgaacccgcgaggaacttctcaacgatatcgcgcaacgttcggtggagagttggcacgccgagttggctggtctggagaaggaggctgcctccccggccgagcggctggcgatcctgctgatgtggctgttgccgacgagccgcagtggtttacgtgaggagcgcgcgaggatcaatctgctgtccagtcagctcgtcgggcaaagtcatcggcgtgcttttactgcttgggacgacacaattcgggagatattgcgcgaccatgtgaagccgctggtcacgcgcggccg

SEQ ID NO: 568 - protein, 141 aa, Homo sapiens
DHDRRRADIARVTLDLLAEGGVTAVNFRAIAERLGGSTTIVTHYYRTREELLNDIAQRSVESWHAELAGLEKEAASPAERLAILLMWLLPTSRSGLREERARINLLSSQLVGQSHRRAFTAWDDTIREILRDHVKPLVTRG

SEQ ID NO: 569 - DNA, 258 bp, Homo sapiens
  misc_feature (96): wherein any n is one of a or t or g or c
ggccgcgcgctcttcgcccccgccggatcgaccacaaggcccactgccgagcgtgtccgccaggcgctgttcgacatgtcgccccatgcccccctnggtcgcccgggcctcgacggactgcatgttctcgacgccttcgccggttccggcgcactggccttcgaagccctctcccggggagctgccagcgcatcgatgttcgacaccgaccgcgcagcccagggccgccatcagccataacatcgaagactctgccgg

SEQ ID NO: 570 - protein, 79 aa, Homo sapiens
GRALFAPAGSTTRPTAERVRQALFDMSPHAPLGRPGLDGLHVLDAFAGSGALAFEALSRGAASASMFDTDRAAQGRHQP

SEQ ID NO: 571 - DNA, 397 bp, Homo sapiens
acgcgtgtgagctccagcagcggaacgagctggtgtggtgcggcgaacatgggtgttcccgtcaccgcgatcggtggatgcttcgcggtggtcccgacgttcaacaccgcttcgctccgcgcggagccgatggtcatcatccggtgcgcctcgtcgtagatcatgacgtcgcacgaccatgcggccactcgagcggcgagttcactccgcgccgcgagaagactgtcgccgacgacgagcacgccagtgtcagggaacggcggctccttgcgggtcgggctgatgacggtcgggttggggtcgataccggcgatgcgcgcttccttcgcccagttcgaggtgagaagcggcgggcacacgataagcgtccgccgcgcgcgaaggatccgcgcggccg

SEQ ID NO: 572 - protein, 106 aa, Homo sapiens
MLRGGPDVQHRFAPRGADGHHPVRLVVDHDVARPCGHSSGEFTPRREKTVADDEHASVRERRLLAGRADDGRVGVDTGDARFLRPVRGEKRRAHDKRPPRAKDPRG

SEQ ID NO: 573 - DNA, 356 bp, Homo sapiens
  misc_feature (1)..(356): wherein any n is one of a or t or g or c
nnagatctcgagcactcgcctagactagacgtcttctcttcgtgccgggactgggcggcccctggcactgccgagtcgtcctccggcccgtgtatgtcgttggcacaaggtaagtttttatccatgagtgcagtggcgcagttggcaggcgtgggagttcgacgcggggatcgttggatcctcgacaatgtcgacctcgacgtctcggacggtcaacgctgggtgctggtcgggcctaatggagcaggtaagacgacccttctgcaggtcctgggagctcagcttcatcccactgtggggctggtggagattctcgatgagatcctcggtgcagttgatgtatttgaactgcggcn

SEQ ID NO: 574 - protein, 77 aa, Homo sapiens
MSAVAQLAGVGVRRGDRWILDNVDLDVSDGQRWVLVGPNGAGKTTLLQVLGAQLHPTVGLVEILDEILGAVDVFELR

SEQ ID NO: 575 - DNA, 431 bp, Homo sapiens
ggccatgtgcgagtattccctaccaaacctggacttttactattagaaggggagcccattcatcttattcgtccgcgtcaaaccccacgtggtccacaactttccaatagtggttcgcggctcgctgcacatccgcagcgggcacgtacagcacgcgcatcgcgtatatgggtggaagggaaacatgatgctcttatcgtgcagcaagtatgggggcatgatcttgcccaagaggggattgtggtagaagaactatccggtctcgataaccttccggagcggcttgcctacttttctccctctcctcaacgacgagtgggtgtactggctgatcatctcatcactggtacaaaagaaactgcattagtagacaatgttggcgaatacgttcttgtcactgggcatccttttgtcgatatttgggcgggcgt

SEQ ID NO: 576 - protein, 143 aa, Homo sapiens
GHVRVFPTKPGLLLLEGEPIHLIRPRQTPRGPQLSNSGSRLAAHPQRARTARASRIWVEGKHDALIVQQVWGHDLAQEGIVVEELSGLDNLPERLAYFSPSPQRRVGVLADHLITGTKETALVDNVGEYVLVTGHPFVDIWAG

SEQ ID NO: 577 - DNA, 363 bp, Homo sapiens
agatctcaagggattacaagacgctgtctccggtatgaccgaggcgatccgaaatgatgactcgactagtttcgccaaacacgatcacgcttttcaccggagccttttggccgctactcgcaatccgctgtacatcgcccatgctccgatgttgcttagctactttgctgaacaacacgatgaccgcaaccttacaagtgaagacggggccgatctcgtccagcaccgcgacattcttgacgctatcacgatgagtgatccggacgcggctgagcagtccacccgggtcctcgtcctggggctcggacgagtattgcctcagcccacggtggcgagcggtccggcctctgcatggatattcga

SEQ ID NO: 578 - protein, 109 aa, Homo sapiens
MTEAIRNDDSTSFAKHDHAFHRSLLAATRNPLYIAHAPMLLSYFAEQHDDRNLTSEDGADLVQHRDILDAITMSDPDAAEQSTRVLVLGLGRVLPQPTVASGPASAWIF

SEQ ID NO: 579 - DNA, 425 bp, Homo sapiens
aagcttctgcatttcacagctgaagtattttgcatttcaaaaccccttgcatttcacagcttaaaaaaacctgatgcaactaaatgaacacaaaaaccctaagtcccaccttaatacatctttagacagttactaacaccacataggatcagtcctatacaggaagtaactctcttgacccatttgagttctcagtttctttctccactggagtggaccaggccgttacacccatcatagctacttggtcctgaaatgaaactcagcatacttggcctcttcaggtagctgctggctgagacacaggcatgcgtagcattcggtaggaatagaaagtagcatgacatgaactacttccacttctcaaagtgcaaaccatccagagtctacaggagctgtgagacgaccttgttgagggagaattc

SEQ ID NO: 580 - protein, 51 aa, Homo sapiens
MSCYFLFLPNATHACVSASSYLKRPSMLSFISGPSSYDGCNGLVHSSGERN

SEQ ID NO: 581 - DNA, 326 bp, Homo sapiens
  misc_feature (1): wherein any n is one of a or t or g or c
nagatctgggaggcggtcgcgacttgtattcgcagtgttgctgacgttctggaccctgccgacgacgttgtcgccattgggttaactgggcagggggatggggcatggctcgtggacgagaagggaactcccgttcgccctgcagccatctggctggatggccgtgccagtcagcgtgccgagcagtggaatgatgacggccgggcagttcgggtattcgaggttacgggaaccaaaatcttcgggggtttgttcccccttctcatcgaggagctattggaaacggatccacagaataccagtcgtgccgccacccacctcaattg

SEQ ID NO: 582 - protein, 108 aa, Homo sapiens
  VARIANT (1): wherein Xaa may be any one of Glu or Gln or Lys
XIWEAVATCIRSVADVLDPADDVVAIGLTGQGDGAWLVDEKGTPVRPAAIWLDGRASQRAEQWNDDGRAVRVFEVTGTKIFGGLFPLLIEELLETDPQNTSRAATHLN

SEQ ID NO: 583 - DNA, 267 bp, Homo sapiens
atcatgagccagtttgcgcaggttggccagtatgtccagatggataactgggtgtttcgtgccgtcagtgccgctgtgccagggcgatacaccttcattctcaatgccactcgtgatgttccgaaggtcatgctgcacccgcgaaagaaaaccgttggggtgcgcgtccccgagcatgtgacagccctggccctgctggaagcattgaatgagcccattgtctcctccaccctcatcctgcccggtcaggacacacctatggtcgac

SEQ ID NO: 584 - protein, 89 aa, Homo sapiens
IMSQFAQVGQYVQMDNWVFRAVSAAVPGRYTFILNATRDVPKVMLHPRKKTVGVRVPEHVTALALLEALNEPIVSSTLILPGQDTPMVD

SEQ ID NO: 585 - DNA, 356 bp, Homo sapiens
gtgacaagacacactgtctctgaaggggcggccttgctgggggtgggcgctcccggcgttaacacccttggctgcagatcccccctttccagcctcctctgcagacctgcccttcctggctcctggggaggggctgcaccttgccccccccgccctctgcaaggggcctgcagccagcatggcctcgggaccatccacaggaacatgatctgcgacccccgtctcacctgtaagatgagatgccggccctgggacacggggactgggctgtgggtacaaggtcagcaggccgtgtgccagcctggatgccctgccaccagtctggaggaaggcgggtgtcaaggggctggcgggag

SEQ ID NO: 586 - protein, 68 aa, Homo sapiens
MFLWMVPRPCWLQAPCRGRGGQGAAPPQEPGRAGLQRRLERGDLQPRVLTPGAPTPSKAAPSETVCLV

SEQ ID NO: 587 - DNA, 406 bp, Homo sapiens
  misc_feature (1): wherein any n is one of a or t or g or c
ngcccaccccaggttcctgctgttccgggggccaacagagctggaactggggtcaccggctccataacccacttgagtgtggccatacttcccgcttgggatcgtctgttctgcatgtccctggccactgcttcaccctccagtcttcagccagggtggggaaggggtgtgtctcattgtgggaggggccgagtcttaaacaggctttccaccgtcttacttctctccctggatcaccaggcgccttcatcagttgaggctgaaagctgatgacaggagaaagcggaagaagaaaggttggaggcacaataagggcctcagattaaagcaaaccttctaggagtcggggcagggtgaggtacttgatcagtcttagggccgtttggtccctggcagcagcgcgaca

SEQ ID NO: 588 - protein, 65 aa, Homo sapiens
MKAPGDPGREVRRWKACLRLGPSHNETHPFPTLAEDWRVKQWPGTCRTDDPKREVWPHSSGLWSR

SEQ ID NO: 589 - DNA, 289 bp, Homo sapiens
ccatggctgccttgcctagcacagggtccagaacagaaccagaggttgtattattgtgttggttatatgttttcccctgggacaaacaaaacaaagcagatggtttgtgctgtggttcctttgaaccagaaattacaatctttgcttcaagacacaagaggattatgaagccttttaaatgtcctccctttctcgttttactgcgaagcttcagtgaactccaaacccaggggtattcatcgtagcacaacagattaaccaaataggactgggaagtcatttgagatct

SEQ ID NO: 590 - protein, 93 aa, Homo sapiens
MTSQSYLVNLLCYDEYPWVWSSLKLRSKTRKGGHLKGFIILLCLEAKIVISGSKEPQHKPSALFCLSQGKTYNQHNNTTSGSVLDPVLGKAAM

SEQ ID NO: 591 - DNA, 390 bp, Homo sapiens
  misc_feature (1)..(2): wherein any n is one of a or t or g or c
nnccgaatcgacgaggtcgttgagcagctgctgccgctgtaccacttggctgagaactccccgaagccgaagttcatcaacctcgacatggaggaatatcacgaccttgatctgacaatggaagtcttccagaagctccttgaccgccccgaagtgcgtcatgtggaggctggcattgtccttcaggcctacctgcccgactcgctgtccgctctgcaaggtcttgttgagtgggctgaccgtcgtaccgctgccggtggggcggggatcaaagtgcggttggtcaagggcgccaatctcgcgatggagaaggtagatgccgagattcacgggtggcagcagaccccgtggccttccaaacttgccactgacaccaactacaaacgaatt

SEQ ID NO: 592 - protein, 130 aa, Homo sapiens
  VARIANT (1): wherein Xaa may be any one of Phe or Ser or Tyr or Cys or Leu or Pro or His or Arg or Ile or Thr or Asn or Val or Ala or Asp or Gly
XRIDEVVEQLLPLYHLAENSPKPKFINLDMEEYHDLDLTMEVFQKLLDRPEVRHVEAGIVLQAYLPDSLSALQGLVEWADRRTAAGGAGIKVRLVKGANLAMEKVDAEIHGWQQTPWPSKLATDTNYKRI

SEQ ID NO: 593 - DNA, 360 bp, Homo sapiens
atcttcttcctcgccgaaacatatgacgccgagcaggccgaaaagtggggcgtcatcaaccaggccgttgaccacgctgaattggagaacaccgccattgagtggggactgacgatcgctggcaaatccccgcaggcgatccgggtgctcaagtatgcctttaatatggttgacgacggcatcgctggtcagcaggcattcgctggtgaggcgacccggatggcatatatgaccgaggaggcccaggaggggcgtgacgccttcctcgagcaccgctccccggactggtccgactacccctattacttctgaggccgtcgtgggatccgagctgacatcgcgggtgcgggtggtacgcgt

SEQ ID NO: 594 - protein, 103 aa, Homo sapiens
IFFLAETYDAEQAEKWGVINQAVDHAELENTAIEWGLTIAGKSPQAIRVLKYAFNMVDDGIAGQQAFAGEATRMAYMTEEAQEGRDAFLEHRSPDWSDYPYYF

SEQ ID NO: 595 - DNA, 387 bp, Homo sapiens
  misc_feature (387): wherein any n is one of a or t or g or c
tctagaggggaacagatgtaggaaggaggtgggagggaagtggaggcccaaaagaggtgatgaaagtcttcctgaacattcttgaaatggagcgttcatggaaataaagtgagagttatcctgcaagccctccatgaaattaacaaagaacaagatgtggagcttcctggtaagtcaaaatgagatcagtgacaaagcttgggagtatccaaagctgaccagaaatgaagaaggttgtgtgaaggttgtgtggaccaccagaggcacgacagcagactgtgccaccaccccttcaccagaaagccaacaggctggtgccacagattcatgtgacaaacgcccacagcctcaagcacttccagaactccagagcagctctgtcaatgn

SEQ ID NO: 596 - protein, 84 aa, Homo sapiens
MKLTKNKMWSFLVSQNEISDKAWEYPKLTRNEEGCVKVVWTTRGTTADCATTPSPESQQAGATDSCDKRPQPQALPELQSSSVN

SEQ ID NO: 597 - DNA, 474 bp, Homo sapiens
  misc_feature (1)..(2): wherein any n is one of a or t or g or c
nnacgcgtcgggtcggcgaggttgacgctgttgatcctaagccccatgaggacgacgacctcatcgccgagatagcggggctacaggctgctcagtcgatccgggaatcctttaaccaaggctgatgtcctgctcaatggggtagagacgtcgaccggtccgcagccgggtgcgcttgctttgctggaacaggccgtacatgagctggatggcactggggatgctgatcctcacgccgctgagttggctgagcgcgcccgccagatgtcgtatgacctcactgacctcgctgcttcggtcgctggccatgcggctcgggctgaagctgatccgcaaggcctgagggaattggggggtcgtttgccggctattcagcggctgttgagggcgcgcaccactaccctcgacgatctcctcgactccactgcggcagaccgacaccgacttgctgagcttgaccctggcgcgacagat

SEQ ID NO: 598 - protein, 133 aa, Homo sapiens
RGYRLLSRSGNPLTKADVLLNGVETSTGPQPGALALLEQAVHELDGTGDADPHAAELAERARQMSYDLTDLAASVAGHAARAEADPQGLRELGGRLPAIQRLLRARTTTLDDLLDSTAADRHRLAELDPGATD

SEQ ID NO: 599 - DNA, 411 bp, Homo sapiens
  misc_feature (1)..(142): wherein any n is one of a or t or g or c
nnagatctgacgatgttctcaacctctgctgatcacgaccatgcaacctccgatatgcagtacagcatttcggcgcaggagcccgaccccgatccagtaaccttcgataacgcgaagnngccggcaccccaaataactcggntgtacaccgaagtccctgctaacgttccatccagcataagggacttaactagccgaattatcaaggggaaatctacccccgtaaccaaggccatcgcgattcaaaactggcttcgtgacagcgctcgattccattacgacatcaacgcacccgaaggtgacggctatcaagtactggaaaacttcttgctgcgcacccaccgtggttattgcatccatttcgcggcgtcaatggcacttatggcacgacttgaaggtattccgtcacgc

SEQ ID NO: 600 - protein, 137 aa, Homo sapiens
  VARIANT (1): wherein Xaa may be any one of Ala or Arg or Glu or Gln or Gly or Ile or Leu or Lys or Pro or Ser or Thr or Val
  VARIANT (40): wherein Xaa may be any one of Leu or Ser or Trp or Pro or Gln or Arg or Met or Thr or Lys or Val or Ala Glu or Gly
  VARIANT (48): wherein Xaa may be any one of Leu or Met or Val
XDLTMFSTSADHDHATSDMQYSISAQEPDPDPVTFDNAKXPAPQITRXYTEVPANVPSSIRDLTSRIIKGKSTPVTKAIAIQNWLRDSARFHYDINAPEGDGYQVLENFLLRTHRGYCIHFAASMALMARLEGIPSR

SEQ ID NO: 601 - DNA, 390 bp, Homo sapiens
  misc_feature (1)..(369): wherein any n is one of a or t or g or c
nagatctgacaggacggccagcggttgaccaaggctccattgaagatcgtcgacgggcatatcaaggtgccggccaaaccgggcctgggcgtggacatcgacatggacgccgtggcccacgcccacgaactgtacaaaggcatgggcctgggtgcgcgtaatgacagcgtggcgatgcaattcatgattccgggctggacgttcgataacaagcggccgtgcctggtgcgctgacctcagctgaagatcatcgaaaagtgcgcgcccaccccggcgcgcacgccctcacctactgccagcgctaccgagccgccggccaggttggcatcaccacaggcaaacacgccgggcaccgtggtctggcgcgtntcgttggtcagtagataaggt

SEQ ID NO: 602 - protein, 74 aa, Homo sapiens
QDGQRLTKAPLKIVDGHIKVPAKPGLGVDIDMDAVAHAHELYKGMGLGARNDSVAMQFMIPGWTFDNKRPCLVR

SEQ ID NO: 603 - DNA, 447 bp, Homo sapiens
ggatcctctctagtgtgtccattactcttcgagaatccatccggatatcccgaataaacgaaatctgggttaacagagaggagcttttccatagacggttgcccggaggcgagaatcggaatggaatcgtatgccttcttgtactgcgatccaataggacgattacgttgatatgccgttccaaccatccgcttttcgagacccagttcgagcatcgtctcggtcgcggtggaggtcaaggttacggcacgcttaggagcagattcgaatacctgactgacaccacaactggtgacagtcagaggatacgaagtgtgcccctgcatcaccggcaacgttgcagtcgatgcgttcgaaatactgggatcagtgacagcacttccacaaccaaacagactgaatataggcatcgccatcgcggcgataagcgcggtcattcgcacgcgt

SEQ ID NO: 604 - protein, 145 aa, Homo sapiens
MTALIAAMAMPIFSLFGCGSAVTDPSISNASTATLPVMQGHTSYPLTVTSCGVSQVFESAPKRAVTLTSTATETMLELGLEKRMVGTAYQRNRPIGSQYKKAYDSIPILASGQPSMEKLLSVNPDFVYSGYPDGFSKSNGHTRED

SEQ ID NO: 605 - DNA, 390 bp, Homo sapiens
  misc_feature (336): wherein any n is one of a or t or g or c
acgcgttgatcatgcacacaaaggctatggcgtgcggcctgcgacgttagtcgtgctcctacaaccaattgctgccgcaaccagcgctccacataagactcaaacagcttttccatcgggaagagcaggctcatgccttgccattgtccagtcacagcaacgggcatctgctgctggaggatcaactcgcaccaaggcttaattgcctggtaatgcgccatcagtcgatcacagctccaggcgcgcaggtccatgctcacgtggcgactagcaggcatctcagctagcatagcgcgcagctcacttgccagacgccagttagcagcgtcctgcgtngtcttggccaccagttccaacgccaacttcagcaggcggttctctgctcgatca

SEQ ID NO: 606 - protein, 96 aa, Homo sapiens
MLAEMPASRHVSMDLRAWSCDRLMAHYQAIKPWCELILQQQMPVAVTGQWQGMSLLFPMEKLFESYVERWLRQQLVVGARLTSQAARHSLCVHDQR

SEQ ID NO: 607 - DNA, 416 bp, Homo sapiens
acgcgttcggcgtagtccccttcctgccatccgtcctgagctccctgctgcccgtgctgggcgtggccaagcaggacacggtgcgcgtggccttctgctccgctctgcagcgcttcagcgagggtgccctggagtacctagccaacctggaccgagccccagaccccacggtcaggaaggacgcctttgccaccgacatcttcagcgcctacgatgttctcttccatcagtggctgcagagtcgagaagccaagctccgtcttgccgtggtggaggctctggggcctatgagccatctgctgcccagtgagaggctggaagagcagctgcccaagctcctccctgggattctcgccctctacaagaagcacgcagagaccttctacttgtccaagagcctgggccagatcctcgag

SEQ ID NO: 608 - protein, 66 aa, Homo sapiens
MSVAKASFLTVGSGARSRLARYSRAPSLKRCRAEQKATRTVSCLATPSTGSRELRTDGRKGTTPNA

SEQ ID NO: 609 - DNA, 320 bp, Homo sapiens
ggatccgtccacctacccaaccaggaacacctcgcgtgacaagggcaattcaagttgtcaaaacgggtttcgtctacttgctccgaagagttttttcgtcgcctgcaagtcgacacgccgagaaatggctgagaatctcaaagatgttatttggggttcgctggcgacgctgagggtctcctaatcggctttgactatgggttataccggacgccatgaaggtgatcgtcctgggcgttgccattgccgcggcgagtctaaaaagttcatgccaactctgaagtacaggttgatgtttaggagtaggtatcgacacgcgt

SEQ ID NO: 610 - protein, 56 aa, Homo sapiens
MATPRTITFMASGITHSQSRLGDPQRRQRTPNNIFEILSHFSACRLAGDEKTLRSK

SEQ ID NO: 611 - DNA, 280 bp, Homo sapiens
  misc_feature (1)..(2): wherein any n is one of a or t or g or c
nnacgcgtcgccgtcgccccgatcctgtcggtcatggcggagatgaacgaggcgacgcgcgatccggacggtccgctgctgctggtcgaggcgcagatggggcgcgacggccaaccgctcgcggtgtgggcggtcgaggataggctggtgcaggtgctgcgcaacctgatcggcaatgcggagagcttttctccgccgggcggccgcatctggctgcgggtggccgaggccggccggctggcggtatcgatcgccatcgaggacgagggccccgagatct

SEQ ID NO: 612 - protein, 93 aa, Homo sapiens
  VARIANT (1): wherein Xaa may be any one of Ala or Arg or Glu or Gln or Gly or Ile or Leu or Lys or Pro or Ser or Thr or Val
XRVAVAPILSVMAEMNEATRDPDGPLLLVEAQMGRDGQPLAVWAVEDRLVQVLRNLIGNAESFSPPGGRIWLRVAEAGRLAVSIAIEDEGPEI

SEQ ID NO: 613 - DNA, 492 bp, Homo sapiens
  misc_feature (1)..(492): wherein any n is one of a or t or g or c
ngcgcgccgaccttcaacgagaacgtctacacgttcttcgaggtcggcaactattcggcgcacgtcggcttcctgatcgacaacctcaccgcgatgatgatggtcgtggtgacgttcgtgtcgctgctggtgcacgtctacaccatcggctacatgtccgaggatccgggctaccagcgcttcttcagctacatctcgctgttcaccttctcgatgctgatgctggtgatgggcaacaacttcctgcagctgttcttcggctgggaagcggtgggcctggtgtcgtacctgctgatcggcttctggttcaagaagccgaccgcggtgttcgccaacatgaaggcgttcctggtcaaccgtgttggtgacttcggctttctgctgggcatcgccggcgtgctgtactggttcggcagcctcgactacgcgaccgtgttcgccgcggccgattccaccatcggtggcggacagacgatcgaagtgatcaccgcn

SEQ ID NO: 614 - protein, 164 aa, Homo sapiens
  VARIANT (1): wherein Xaa may be any one of Cys or Arg or Ser or Gly
XAPTFNENVYTFFEVGNYSAHVGFLIDNLTAMMMVVVTFVSLLVHVYTIGYMSEDPGYQRFFSYISLFTFSMLMLVMGNNFLQLFFGWEAVGLVSYLLIGFWFKKPTAVFANMKAFLVNRVGDFGFLLGIAGVLYWFGSLDYATVFAAADSTIGGGQTIEVITA

SEQ ID NO: 615 - DNA, 391 bp, Homo sapiens
  misc_feature (1)..(2): wherein any n is one of a or t or g or c
nnaccggtgatgcgcaagtcagacgacatcagagacgaactccgtcggtccgggagattgcaggggcaacagatcgtcatcgacggagagcgggcagagctgagaagcctgatggcctcgataggtctggtcgctgccatccgcgaaggacgtactgtcgtcgatctcgaccctagagctcatctggcgcgggaagttcattcggtcgaggcggttgcatcccgacctgtccggtgcttgcaggtggacagcccttcgcgcctctacctgtgcggttcgacattcattccgacgcacaacacgtatctgattggcgaggagttgcgacgcgcggctcgtctggcagttcagaggcgggtcccgacggagaatgagatctggtacggcgcgc

SEQ ID NO: 616 - protein, 130 aa, Homo sapiens
  VARIANT (1): wherein Xaa may be any one of Ala or Arg or Glu or Gln or Gly or Ile or Leu or Lys or Pro or Ser or Thr or Val
XPVMRKSDDIRDELRRSGRLQGQQIVIDGERAELRSLMASIGLVAAIREGRTVVDLDPRAHLAREVHSVEAVASRPVRCLQVDSPSRLYLCGSTFIPTHNTYLIGEELRRAARLAVQRRVPTENEIWYGA

SEQ ID NO: 617 - DNA, 495 bp, Homo sapiens
accggtacccgcggggtcggcaagaccaccatcgcgcggatcctggccaagtgcctgaactgcgagaccggggtcagctccacgccgtgcggcgaatgctcggtctgtcgcgaaatcgacgaaggccgcttcgtcgacctgatcgaagtggacgccgcgagccggaccaaggtcgaggatacccgcgagctgctcgacaacgtgcagtactcgccgacccgcggacgctacaaggtctacctgatcgacgaagtgcacatgctctcgtcgcacagtttcaatgcgctgctcaagaccctcgaggagccgccgccgcacgtcaagttcctgctggccaccaccgacccgcagaagttgctggtgaccatcctctcgcgctgtctgcagttctccctgaagaacatgccgccggagcgggtggtcgagcacctgacccacgtgctcggagccgagaacgtgcccttcgaggatggcgccctgtggttgctcgggcgc

SEQ ID NO: 618 - protein, 165 aa, Homo sapiens
TGTRGVGKTTIARILAKCLNCETGVSSTPCGECSVCREIDEGRFVDLIEVDAASRTKVEDTRELLDNVQYSPTRGRYKVYLIDEVHMLSSHSFNALLKTLEEPPPHVKFLLATTDPQKLLVTILSRCLQFSLKNMPPERVVEHLTHVLGAENVPFEDGALWLLGR

SEQ ID NO: 619 - DNA, 375 bp, Homo sapiens
  misc_feature (1)..(2): wherein any n is one of a or t or g or c
nnaattgccttcgctatcattgctttaattgttggtgtattgggtggcgtttatgtaggaaaaagatctttattacaagaacaagaacgtgaaaaagatgaagcccacataaccgcacaaggaatcattgaaaatgctaaacgtagcgcagaatctgagcggaaagaaattatcttaaacgcaaaagaagaattgcaacgatatagaaatgaagtagatagtgaagttagagatcgccgtagtgaagttaagaaacaagaagaccgtttaaaccaaaaagaagaaaaattggataggcgggaagcatccatttctgacaaagaaaataaattaagtaatgaagaacaatctttacgtgaccgtaagaaaaaggtg

SEQ ID NO: 620 - protein, 125 aa, Homo sapiens
  VARIANT (1): wherein Xaa may be any one of Ala or Arg or Glu or Gln or Gly or Ile or Leu or Lys or Pro or Ser or Thr or Val
XIAFAIIALIVGVLGGVYVGKRSLLQEQEREKDEAHITAQGIIENAKRSAESERKEIILNAKEELQRYRNEVDSEVRDRRSEVKKQEDRLNQKEEKLDRREASISDKENKLSNEEQSLRDRKKKV

SEQ ID NO: 621 - DNA, 511 bp, Homo sapiens
ggcgagactctcaaaggtatcaacatctttgacgcctacacggttggcggcaacgaacgtctgattggcaacatcgttgaagactcacaagaattcggcaccatcgtggggtttgaaaaccactcgggactaacctacctcggcgcaggatgcgagcccctggcaaccgtgaccaaaggcgtagggaacaactcgacagatcatcacgaaggcgctcgcgtgcacaacgtggtgggtacttatctgcacggttcgcttctgccgaagaacccgaagatttcggactatctgattgaggcggcagcgcaacgcaaatatggggagttcacccctgaaaaaattgatgactcgatggtcgaaaaagcgcgcgcatccgctatgaaacgcccccgctagagcagatactcgctaccgcatccaaacaaaccgcggggtgcataccaaaaactttgacggtatgcaccccgcgaaacgcaggtatgaaactatccgagaaccgcgcgaaaccggt

SEQ ID NO: 622 - protein, 131 aa, Homo sapiens
GETLKGINIFDAYTVGGNERLIGNIVEDSQEFGTIVGFENHSGLTYLGAGCEPLATVTKGVGNNSTDHHEGARVHNVVGTYLHGSLLPKNPKISDYLIEAAAQRKYGEFTPEKIDDSMVEKARASAMKRPR

SEQ ID NO: 623 - DNA, 393 bp, Homo sapiens
  misc_feature (1)..(393): wherein any n is one of a or t or g or c
nccctttccatttgttctagaatgaaaaacttcttgggatccgtgtgctggctgatgaacaactgcagacctgcccttcaggcccctctgccggtccttcctgggcgctctcctcaccgctgaccctgcacttccgagcagcccgccccgtccttctccagatctcagagtgagagtcacttccctttcctctgccacacccacatcactcatgagtagagaggccaccaagaaggcagctgcacgactgtcctgggaagcagcctgggcgcctctccaggtttcctgctcaccgtcaccgcccccacccagctgggctctaatcttcacctcctccaggtcgttttccatccatgtgtaggtagaccgaatgatcaccacaactcagggcgn

SEQ ID NO: 624 - protein, 117 aa, Homo sapiens
MENDLEEVKIRAQLGGGGDGEQETWRGAQAASQDSRAAAFLVASLLMSDVGVAEEREVTLTLRSGEGRGGLLGSAGSAVRRAPRKDRQRGLKGRSAVVHQPAHGSQEVFHSRTNGKG

SEQ ID NO: 625 - DNA, 306 bp, Homo sapiens
cggaggttccgctctgtcttccccctctctgtctcggaccccccagcccggctgcagtctcttctcagggtcctggtacagatgtgcaagatgaaggcctttggagaactgtgccccaacaccgccccattgccccagctggtgactgaggccctgcagactggcaccactgaatggttccacctgaagcagcagcaccatcaacccatggtgcagggcatcccggaggcaggcaaggccttgctgggcctggtacaggatgtcattggcgacctgcaccagtgccagcgcacatgggacaagatc

SEQ ID NO: 626 - protein, 102 aa, Homo sapiens
RRFRSVFPLSVSDPPARLQSLLRVLVQMCKMKAFGELCPNTAPLPQLVTEALQTGTTEWFHLKQQHHQPMVQGIPEAGKALLGLVQDVIGDLHQCQRTWDKI

SEQ ID NO: 627 - DNA, 384 bp, Homo sapiens
  misc_feature (1)..(2): wherein any n is one of a or t or g or c
nnacgcgtcccgctagaaaaactctttcgcgccaggacaccggtagagccgactctggctctcaaccagggcgacgctgagatggcgatcatgcaagctcgacgtgtcgtcgacctcgtcacccgcgtcgcggtgatggcgatctcggtaggaggttccgcgtctgaggccgtcgcaatagccctgcgcatcaccgcgacctacggagtggccgtccacatcgatattacgaacacgtccgtcatcgtcacccagcatcgtggactggacgaagaccccatcaccgcgttgcgggtggttcgttcccgcagcaacgattaccagcgcctgggcgaactgcagtcgctcgtcgatgacatttgcgacaagaccgtaagtctcgag

SEQ ID NO: 628 - protein, 128 aa, Homo sapiens
  VARIANT (1): wherein Xaa may be any one of Ala or Arg or Glu or Gln or Gly or Ile or Leu or Lys or Pro or Ser or Thr or Val
XRVPLEKLFRARTPVEPTLALNQGDAEMAIMQARRVVDLVTRVAVMAISVGGSASEAVAIALRITATYGVAVHIDITNTSVIVTQHRGLDEDPITALRVVRSRSNDYQRLGELQSLVDDICDKTVSLE

SEQ ID NO: 629 - DNA, 545 bp, Homo sapiens
  misc_feature (130)..(170): wherein any n is one of a or t or g or c
gcgcccgtcggttttcgtctggcgctcaagcaccctgagcggatcaccgcgatcgtcagccagaacggcaatacctatctcgagggtgtctccgaggcgttcgcgccggtgcaggcgtactggaacgatncccagccagaccaaccgtgacgcgttgcgtggcttcctnngacgccgcagacgacgctcttccagtacacgcacggtgtggcggatccgggcctggtttcgccagacggccgcaatctcgatgatttctatctcgcgcggcccggaaacgacgagatccagctcgatctcctgctcgactatcggtccaatgtcgccctctacggcgccattcagaactatctgcgcacccatctgccgccggtgctggttgtctggggcaaaaacgacccgttcttcgttccgccgggcggcgaggcgttcaggcgcgacgtgccgtcggccgacatacggttcttcgacaccggtcacttcgcgctggagacgcacgccaccgagatcggcgcggcgcatgcgcgaagttcctcggattcggg

SEQ ID NO: 630 - protein, 131 aa, Homo sapiens
  VARIANT (7): wherein Xaa may be any one of Leu or Ser or Trp or Pro or Gln or Arg or Met or Thr or Lys or Val or Ala or Glu or Gly
RVAWLPXTPQTTLFQYTHGVADPGLVSPDGRNLDDFYLARPGNDEIQLDLLLDYRSNVALYGAIQNYLRTHLPPVLVVWGKNDPFFVPPGGEAFRRDVPSADIRFFDTGHFALETHATEIGAAHARSSSDS

SEQ ID NO: 631 - DNA, 444 bp, Homo sapiens
acgcgtcctcctttagtcgatcgcgaatatgataggcgaagcgacgtgatggtgtgacgcacgagcactgccccatctcctaggcttagggttatgcagactcccatcgacgctacctccacccccgcatggggcacactctccggcctaaagtcccgcttcgctgacgggccacataaactgcgccgtttgttcgacgccgaccctcaccgcgctgagcgctacacctttgacgtcgcggatttgcacgtcgatttatcgaagaacctccttaccgacgagattcgtgacgctctcctcgaactggctgcgcagatgcgcgtcaccgagcgtcgtgacgcgatgtatgccggtgagcacatcaacgtcgccgaggaccgcgccgtcctccataccgcgctgcgtcgtccccgcactgacgagctgcatgttgacggtcaggat

SEQ ID NO: 632 - protein, 117 aa, Homo sapiens
MQTPIDATSTPAWGTLSGLKSRFADGPHKLRRLFDADPHRAERYTFDVADLHVDLSKNLLTDEIRDALLELAAQMRVTERRDAMYAGEHINVAEDRAVLHTALRRPRTDELHVDGQD

SEQ ID NO: 633 - DNA, 525 bp, Homo sapiens
agatcttcctcgttccagccggcaactgccgcgatataagtggagtcgagacttccatgagactggtcaaagtatcgagtcttaaggacgccatcgctgctatccagaaaatctgtgccgggggaacgggaataccgcattgttgaatgatgaggacgtggagatgacgcaggatccccaggtcgcacagggagtatcagagtcggctgatgatgccttgattgcgtgcttgactgagatcgagaggtttgttgcttcgtcgagctggggcggtccgcctcgtctattcgcgctggtgcgtaccgtcgatcttgtgaaagctgagccagcgctggctggtcagcttgccatcggtagccatgacagcttgtccagtatcgagcaggacgactttcgtcccggtgaagaccttgctcaggcccttgccaccacgacgtggggtgatgctgtggatggggccgctgtctgcgtcgagagggatatcttacccgatgactgcgccgataagatacctcacgacccggg

SEQ ID NO: 634 - protein, 120 aa, Homo sapiens
MTQDPQVAQGVSESADDALIACLTEIERFVASSSWGGPPRLFALVRTVDLVKAEPALAGQLAIGSHDSLSSIEQDDFRPGEDLAQALATTTWGDAVDGAAVCVERDILPDDCADKIPHDP

SEQ ID NO: 635 - DNA, 333 bp, Homo sapiens
gcgccgaaggtcgccgccttcgcgctgctgatccgcatgttgctcggcccgctcggcatgctcgcccatcaatggcagttgctgatcgagatcgtcgccatctgctcgatggtgctcggctcgctcgccgccatcgcccagaccgatatcaagcgtctgatggcctattcctcgatcggccatatgggctacgcgctgatgggcatcgcagccggcagtgaagccggcaccaccgcgaccctggtctatctgttcacctacgtagtgatgaacgccggcgccttcgcctgcatcgtggcgatgcggcgtcgcggcgaggcggtgaccgtgatc

SEQ ID NO: 636 - protein, 111 aa, Homo sapiens
APKVAAFALLIRMLLGPLGMLAHQWQLLIEIVAICSMVLGSLAAIAQTDIKRLMAYSSIGHMGYALMGIAAGSEAGTTATLVYLFTYVVMNAGAFACIVAMRRRGEAVTVI

SEQ ID NO: 637 - DNA, 244 bp, Homo sapiens
gctagcacgagtaagctggccttgatgtaaccggcatgaaaggcgtcccacatgggtgaaccacggatcatcgacaccgctgatttggacgacggtgtgaccatcggcgacggttcgtcgatctggcatctttctcaagttcgcagcgaggccgtcctcgggcagaacgtcgtcgtgggccgcggtgcctacatcggcgagggcgtccacgttggcgacaactgcaagatccagaattacgcgt

SEQ ID NO: 638 - protein, 64 aa, Homo sapiens
MGEPRIIDTADLDDGVTIGDGSSIWHLSQVRSEAVLGQNVVVGRGAYIGEGVHVGDNCKIQNYA

SEQ ID NO: 639 - DNA, 495 bp, Homo sapiens
tggccacgcgggcggtcgccaagagcgatccagctctggcggacgagattcttgacgccgtgcgcaccaccctgctggacatggttgcccggcaggccggggtggccgggtgagcgcgagacgatgaccctgtcccgtggccgccggatcgtgctcgcaccgcgcccgcagggccgcccgcgactggagaatttccgtctcgaggaggtcgatatccccgcgaccccggcgggcggcgtagttctcggcacacgctggctgtcgctcgatccttacatgcgcggtcgcatggaggatcgcaaatcctatgccacccccgtcggactcggcgaggtcatggaaggcgaggcgatctcggagatcctggcctcggatcaccccggctacggcgtcggcgagctcgtattggcgaggacgggatggcgcacccacgccgcctccgacggcgccgggctgcgcaggatcacgcccgagctgtcacactccacgacgcgt

SEQ ID NO: 640 - protein, 165 aa, Homo sapiens
WPRGRSPRAIQLWRTRFLTPCAPPCWTWLPGRPGWPGERETMTLSRGRRIVLAPRPQGRPRLENFRLEEVDIPATPAGGVVLGTRWLSLDPYMRGRMEDRKSYATPVGLGEVMEGEAISEILASDHPGYGVGELVLARTGWRTHAASDGAGLRRITPELSHSTTR

SEQ ID NO: 641 - DNA, 507 bp, Homo sapiens
  misc_feature (247)..(289): wherein any n is one of a or t or g or c
gcgctgaaggtgctgccggaacagcacttcatcaattggcagcaagacccccagggcaattacctggcgcgtctggtgtttccggaaaaaactgacgaattgcgcatcgaggtcgacctggtcgccgagatggcggtattcaatccgttcgattttttcctggaaccctacgccgaaaaaatccctttcagctacgccgccgatgagcagcgcgagctggcgccgtacctggaaacattaccgctgnnaccccgcgattcgccgcgtatctggcgggtatcgaccgtancgccgttgccggcagtggattttctggtaggcctcaatcagcgcctggccgccgatatcggctacttgatccgcatggagccgggcgtacaaactccggaattcaccctggaaaacgcctccggttcctgccgggattcggcgtggttgctggtgcaactgctgcgcaacctgggcctggcggcgcgatttgtgtctggctatctgatccaactgacc

SEQ ID NO: 642 - protein, 169 aa, Homo sapiens
  VARIANT (83): wherein Xaa may be any one of Ala or Arg or Glu or Gln or Gly or Ile or Leu or Lys or Pro or Ser or Thr or Val
  VARIANT (97): wherein Xaa may be any one of Ala or Pro or Ser or Thr
ALKVLPEQHFINWQQDPQGNYLARLVFPEKTDELRIEVDLVAEMAVFNPFDFFLEPYAEKIPFSYAADEQRELAPYLETLPLXPRDSPRIWRVSTVXPLPAVDFLVGLNQRLAADIGYLIRMEPGVQTPEFTLENASGSCRDSAWLLVQLLRNLGLAARFVSGYLIQLT

SEQ ID NO: 643 - DNA, 531 bp, Homo sapiens
  misc_feature (1): wherein any n is one of a or t or g or c
ncgctgaagctggactcggtcaacgctgacgacttcgacaccgtcttctacccaggcggccatggcccgctgtgggacctggcagagtcgaaaatctccatcgccctgatcgaagccttcgagcgtgccggcaagccgattggctttgtgtgccatgccccgggcgccttgcgtcacgtcaaggccgtcaacggcgaaccgctggtcaagggtcgacgcgtcaccggcttctccaactccgaagaagccgcggttggcctgaccgacgtagtgccgttcctgatcgaggacgatttcaaggcactgggcggcaagtatgaaaagggtgccgattggcagtcctttgtgattgaagatggcctgctggtcaccgggcagaatcctgccagttccagcgacgtcgccaaagcgctgttgaagctgaccgcgtaacccgctaaatccccccaaagtaagtggttggcggctcccctgagcgggagccggccacttctgcacgcccgaaattcgcttctggaacccccatcatga

SEQ ID NO: 644 - protein, 143 aa, Homo sapiens
  VARIANT (1): wherein Xaa may be any one of Ala or Pro or Thr or Ser
XLKLDSVNADDFDTVFYPGGHGPLWDLAESKISIALIEAFERAGKPIGFVCHAPGALRHVKAVNGEPLVKGRRVTGFSNSEEAAVGLTDVVPFLIEDDFKALGGKYEKGADWQSFVIEDGLLVTGQNPASSSDVAKALLKLTA

SEQ ID NO: 645 - DNA, 462 bp, Homo sapiens
tggcttgggcagcggatccgcgagctggtgctctctcccgactccgggccgatctcctcgcgcgccgaggctttgctgtacaacgccgacaaggcccaacacgtcgacgaggttgtcattccagctttgcgagagggcaaggtcgtcgtctgcgaccgctacgttgactcgactatcgcctatcagggggctggcagggtcctcgaccctggcgaggtcggccagctcgcgtgttgggcgacgaccggcctggtacctgatgtgacggttctgctcgacgtcgatccctgcgaaggagccggtaagatcgccgccaaggatcgtctggaagctgctggtgacgagttccaccttcgggtgcgtcaacattttcttgacctcgctgcggcccatccgcagcgatacctcgtgctgaacgcgcggaagagccgcaaggagatcagtgaggccatctgtcaacgc

SEQ ID NO: 646 - protein, 154 aa, Homo sapiens
WLGQRIRELVLSPDSGPISSRAEALLYNADKAQHVDEVVIPALREGKVVVCDRYVDSTIAYQGAGRVLDPGEVGQLACWATTGLVPDVTVLLDVDPCEGAGKIAAKDRLEAAGDEFHLRVRQHFLDLAAAHPQRYLVLNARKSRKEISEAICQR

SEQ ID NO: 647 - DNA, 423 bp, Homo sapiens
cgcgtccagcacgagagattcgatgctggcccggacttctctgcaactgattatttgcatacttttgggctcacagacgagcgcgcagagcgaatgaagccccatgcgatcatcatgcacccggctcctgtaaaccgaggatgtgaaatttccggtcacctcgtagaggccccctcctctcgtatctttgagcagatggggaacggagtcatggtgcgaatggccattttggaacaggtgttgcacggcagggagacaaagtgagccgccgggtcctcctcaccgggctgaccatgctggtgggagccactccggttccctcccagctcctcatccgtgatgagcggatcgaggccatgtcacgagggcggtctaacgccctcgacggggccgatgctgaggttgtcgatcttggtgtggcca

SEQ ID NO: 648 - protein, 87 aa, Homo sapiens
RVQHERFDAGPDFSATDYLHTFGLTDERAERMKPHAIIMHPAPVNRGCEISGHLVEAPSSRIFEQMGNGVMVRMAILEQVLHGRETK

SEQ ID NO: 649 - DNA, 348 bp, Homo sapiens
acgcgtttgcgcatcgctttgaccggtctgacgatggctgagtacttccgcgatgttcagaaccaggacgtgctgttgttcatcgacaacatcttccggttctcccaggctggttctgaggtttcaaccctgctaggtcgtatgccctcggcggtgggctaccagcccaacttggccgacgagatgggccaattgcaggagcgaatcacctcgacccgtggtcactccatcacctcgatgcaggccgtctacgtccccgctgacgattacaccgacccggctccggcgacgaccttcgcccacctggatgccaccacggagctttctcgtgagattgcctctcgtggc

SEQ ID NO: 650 - protein, 116 aa, Homo sapiens
TRLRIALTGLTMAEYFRDVQNQDVLLFIDNIFRFSQAGSEVSTLLGRMPSAVGYQPNLADEMGQLQERITSTRGHSITSMQAVYVPADDYTDPAPATTFAHLDATTELSREIASRG

SEQ ID NO: 651 - DNA, 325 bp, Homo sapiens
gctagcggaggctagttttctcagccgtcaagaagtatccgaccaagttaatgctgggcgtctccagttgccaccgactctgtccatagcaagagcacttattgacgcgtggctagaacaccgacttccggagccagaaagcgggtttgacttatcggccccactgaggtgatagtccatcgaccttgagactccggtctcatcaggaagtgcgactttcttcccaccggcgctgaatcccagaacgtcgatcattagcccggtcaatcgccctctccacagactcccttgtgcctaccacagtgaggtgttcacgtgcacgcgt

SEQ ID NO: 652 - protein, 75 aa, Homo sapiens
MIDVLGFSAGGKKVALPDETGVSRSMDYHLSGADKSNPLSGSGSRCSSHASISALAMDRVGGNWRRPALTWSDTS

SEQ ID NO: 653 - DNA, 365 bp, Homo sapiens
gcgtcggcgtgttcggcaaccgcggcttcaccggcaattacagccaggcgctcggcacggtcgccgccgacccgacgctcgacatcaacgccgtgatggcgggcatccgcaaggacaacctgaaatacggcttctatctcaacgccgagcagcagatcgcaaccgatgtcggcgtgttcggtcgcctgagctggaatgacggccagaacgagatcctgtcgttcaccgacgtcgaccgcagcctttcgggcggcgtgtcgatcaagggcgcccgatgggggcggccggacgacaccatcggcatcggcgacgcgatcaacgggctctccgcctcgcatcgcgacttcctcgccgccggcggtacc

SEQ ID NO: 654 - protein, 58 aa, Homo sapiens
AGMTARTRSCRSPTSTAAFRAACRSRAPDGGGRTTPSASATRSTGSPPRIATSSPPAV

SEQ ID NO: 655 - DNA, 471 bp, Homo sapiens
  misc_feature (1): wherein any n is one of a or t or g or c
ngcgcgccgttggaagttgcgctgatcaatgccgtgaccgtgttggtgatcgcttgcccttgcgcccttggcctcgctacacccaccgccatcatggccggcaccggcgtcgccgcccgccatggcattctgatcaaggacgccgaagccctggaacgcgcccatgaagtcagctccgtggtgttcgacaagaccggcaccctgacctccggcaccccgaaaattgcgcacttggccgccgtcgatggcgatgaagctgccctgctgcaacaggccggcgcgttgcaacgtggcagtgaacacccgctggccaaggcggtgctggatgcctgtgccgatcaaggcttgaacgtcgcagatgtcagcgccagccagtccctgaccgggcgcggcatcgcaggcactctcgacggtcggcaactggcgctgggcaaccgtcgcctgctggaagaaaccggcttgagcaccggt

SEQ ID NO: 656 - protein, 157 aa, Homo sapiens
  VARIANT (1): wherein Xaa may be any one of Arg or Cys or Gly or Ser
XAPLEVALINAVTVLVIACPCALGLATPTAIMAGTGVAARHGILIKDAEALERAHEVSSVVFDKTGTLTSGTPKIAHLAAVDGDEAALLQQAGALQRGSEHPLAKAVLDACADQGLNVADVSASQSLTGRGIAGTLDGRQLALGNRRLLEETGLSTG

SEQ ID NO: 657 - DNA, 467 bp, Homo sapiens
  misc_feature (1)..(467): wherein any n is one of a or t or g or c
nncgcagagctcttctccactgtgacggaaagagtacgtaccatcatgtcccagaacgtggcagccggggtcgttcccgcccttcccgttgtggacaccatcaaaatggtggatagttcgggcaatgttctgggaacgccagatcgtactcgtttacgccgggtacaaaccccgcagggttttgacgcgaaactgttatggacgctgcaccaggaggcccgcaaagagggactctcgaccacggatgacgctgcccttttggagaagttccagtttggtgtcgctactgtgcccggggacgagaaagccctcaagattactacccccaccgatttacgcctcgcccaattcattatggaagaggatgttgaaggataaacgcacatggagactgcgaattggcgcaatttcttcccccgcgttggcgtcggcactgatgcccaccaaataggagccgaccgcgaatn

SEQ ID NO: 658 - protein, 125 aa, Homo sapiens
  VARIANT (1): wherein Xaa may be any one of Phe or Ser or Tyr or Cys or Leu or Pro or His or Arg or Ile or Thr or Asn or Val or Ala or Asp or Gly
XAELFSTVTERVRTIMSQNVAAGVVPALPVVDTIKMVDSSGNVLGTPDRTRLRRVQTPQGFDAKLLWTLHQEARKEGLSTTDDAALLEKFQFGVATVPGDEKALKITTPTDLRLAQFIMEEDVEG

SEQ ID NO: 659 - DNA, 318 bp, Homo sapiens
  misc_feature (1)..(2): wherein any n is one of a or t or g or c
nnacgcgtgagccgtgcggacggccgcgagacgtcattcaggggagaaaatgagatcgccacatgttcctgtcgggaacatgtggtgcttgcggggacggatacatgaccatcgaacatcccagtttcgggccgcatcgacgacggccgcgtcatcatcttcgacaccaccttgcgtgacggtgagcagtcgcccggtttctcgatgaacatcgacgagaagctgcgcatggccgagatgctggccagcctcggcgccgacgtgatcgaggccggtttcccggtggcgagccagggcgatttcgacagcgtgctcgag

SEQ ID NO: 660 - protein, 70 aa, Homo sapiens
PSNIPVSGRIDDGRVIIFDTTLRDGEQSPGFSMNIDEKLRMAEMLASLGADVIEAGFPVASQGDFDSVLE

SEQ ID NO: 661 - DNA, 411 bp, Homo sapiens
  misc_feature (1): wherein any n is one of a or t or g or c
ntcgcgaccacggatatcagcgacacccacattggcaatctgcgacagctgaagaaatggggcatgcccatcagccatgagttgaaactggccaaagggattcaggattgcctcgactactaccgcgatatcggtgagcgacggaatgccttgccctatgaaatcgacggtgtggtgtccaaggtcaatagcattgcctaccaacgtgaactgggcttccgtgcccgcgaaccgcgttgggcaatcgcccacaagttcccggcgatggaggaactgaccgaactgctggacgttgagttccaggtgggtcgtaccggcgctgtgacgcccgtggcacgcttgaaaccggtcaaggttgcgggtgtgaccgtgtccaacgccaccttgcacaacatggacgaagtggcgcgc

SEQ ID NO: 662 - protein, 137 aa, Homo sapiens
  VARIANT (1): wherein Xaa may be any one of Ile or Leu or Phe or Val
XATTDISDTHIGNLRQLKKWGMPISHELKLAKGIQDCLDYYRDIGERRNALPYEIDGVVSKVNSIAYQRELGFRAREPRWAIAHKFPAMEELTELLDVEFQVGRTGAVTPVARLKPVKVAGVTVSNATLHNMDEVAR

SEQ ID NO: 663 - DNA, 417 bp, Homo sapiens
gcgttaaaacgtaagttaattcaaacggcagatagtattgcaaatgatggctataatgatgaattagaactagatacaatcctaagtgatgccgaaagacgtatccttgaactttcttctacaagaggaagtgacgggtttaaagatattagagatgtcttaggacaagtgtatgagactgccgaagaactcgaccaaaatagtggtcaaacgcctggtattccaacaggttatcgagatctcgaccaaatgactgctgggtttaaccgtaatgatttaatcatcttagcggctcgtccttccgtgggtaagactgccttcgctcttaatattgcccaaaaagttgcgacacatgaagatatgtttacaataggcatattctcgcttgagatgggtgcagaccagttagcaacgcgt

SEQ ID NO: 664 - protein, 139 aa, Homo sapiens
ALKRKLIQTADSIANDGYNDELELDTILSDAERRILELSSTRGSDGFKDIRDVLGQVYETAEELDQNSGQTPGIPTGYRDLDQMTAGFNRNDLIILAARPSVGKTAFALNIAQKVATHEDMFTIGIFSLEMGADQLATR

SEQ ID NO: 665 - DNA, 391 bp, Homo sapiens
gcgcgccttttggtggcaaaagcctcgttctcggttttgccatcaatccagattttgcgccgacgaggcatgtcagtgtttctctcgcccatcacggagtcgcagcggctcgaagcgctcgacggctacgacatcctcgacacctcgccggaggtcgggttcgatgatgccgtcttgctggctcgccagatatgcaacactcccatcgccttggtgagcctggtcgcttcgaagcgacaatggttcaaggcagcggcagggctcgatctccgcgagacgccaatcgagcaatcggtgtgtgctcatgcgttgcggcaggcggatacgttgatcattccagacctgtccctggatcctcgcactcggaccaataccttggtcaccggcgcgc

SEQ ID NO: 666 - protein, 130 aa, Homo sapiens
ARLLVAKASFSVLPSIQILRRRGMSVFLSPITESQRLEALDGYDILDTSPEVGFDDAVLLARQICNTPIALVSLVASKRQWFKAAAGLDLRETPIEQSVCAHALRQADTLIIPDLSLDPRTRTNTLVTGA

SEQ ID NO: 667 - DNA, 629 bp, Homo sapiens
acgcgtcggtggccaagtcgccgaccttccagagcaagctggccctctcctccgagcacatggagatgacggccgccgtgctggccgacggaatcgccaagaacaagaagctttccggcaatgccatgggcccggcgtcgacgctgcgggccacgctgacccagcagctcaacgaccacgtctggctggccggtaacgcgctggacaccgcggtgatgaagggcggcaacctcaaggacgcccaggtcgtcggtgcggtctccgcgctggacaacaactcggtggatctgtccaagaccctcggcagtgtctacccggcagctgccaagccgttcctggcctcctggcgtcagcacatcggcttcttcgtcaactacaccctcggcaaggcgacgaagaacacggcgatggtgacgaaggcgaagtccgatctcgacgggtaccggactggcttcggtcagctgatccactccgtcgtgccgcagttgccggccgccgcggtggcgaacgagctcaagccgcacgtcgcctcgctgctcaccgcgatcgaccctcggtggcaagagccgagctgcgacaagtcacacatcgcgacactgctatacggctgtgattcactcgtgcgatcg

SEQ ID NO: 668 - protein, 190 aa, Homo sapiens
MEMTAAVLADGIAKNKKLSGNAMGPASTLRATLTQQLNDHVWLAGNALDTAVMKGGNLKDAQVVGAVSALDNNSVDLSKTLGSVYPAAAKPFLASWRQHIGFFVNYTLGKATKNTAMVTKAKSDLDGYRTGFGQLIHSVVPQLPAAAVANELKPHVASLLTAIDPRWQEPSCDKSHIATLLYGCDSLVRS

SEQ ID NO: 669 - DNA, 584 bp, Homo sapiens
  misc_feature (31)..(584): wherein any n is one of a or t or g or c
ccgccgccatcatgtcccgccccggggcctncgcgtcgcgccgcggcatccaggttcccgacagcacattcacatgcggtagataagcgcacgccgtcacgatgaggcgggtcacgccgttcgaagcccgtctcccgtcgagtgatcatccgccgccggatcatcttcagcgcgctcgccgtcgtcacgatcgccgtgatcgtcgccgcggtcggcatcgtgatgaccctcgccgacctgaacggcatccaccgatcggacatctcgatgcccgacggcggcgtcgcgcagaacaccggcgaggtcaacatcctcgtgatgggcctcgacagccgcgtcgatgaggatggcaacccctacccgcaggacatctacaacgcgatccacgcggaggacgagagcgtcggcggctacaacaccaacgtgctgatgtacatccacattcccgccggaggcggccccgcggtcggtgtatcgatcccccgcgacgactacgtggcctacgcgaacaagcccgccggcatcacgcacggaaagatcaaggaggactacggccgcacactggatgcctcgtacaacgcgan

SEQ ID NO: 670 - protein, 120 aa, Homo sapiens
MTLADLNGIHRSDISMPDGGVAQNTGEVNILVMGLDSRVDEDGNPYPQDIYNAIHAEDESVGGYNTNVLMYIHIPAGGGPAVGVSIPRDDYVAYANKPAGITHGKIKEDYGRTLDASYNA

SEQ ID NO: 671 - DNA, 316 bp, Homo sapiens
acgcgtgatccagcaggcaacacatcacccatgtgggagcctgcttgtgtgggagccgggcttgcccgcgatgcagtcaactcggtttgtcagttacaccgaggtgatgctatcgcaggcaagccagctcccacattggtctctgttcctacagggaaatcgtcgtcttgcgccgttgcctacagttacgccagaatccgccggcttgtgcgtctggatgggcgtctctaaggttgctcggtcgctgatttctcagtgatcgggtttagtagcccgagtgtgtgtcgttaagtgcataagcttcatctttcaggcg

SEQ ID NO: 672 - protein, 66 aa, Homo sapiens
MWEPACVGAGLARDAVNSVCQLHRGDAIAGKPAPTLVSVPTGKSSSCAVAYSYARIRRLVRLDGRL

SEQ ID NO: 673 - DNA, 306 bp, Homo sapiens
gcgcgccgtgccatcgtcaccgacccggactttcatggcggcaacttctaccagcatggcgtgattccgcagcgcggcctgcgcattgcgcgcatgatcggtcacatcacctacctgtccgacgacgtgatgaaccagaagtttggccgtgctgcgcgagggtctggagctgaaataagcacgcaggacatcgagttccagatcgaaagctacctgcgttaccagggcgacaagttcagcagctacttcgatgccaacacctatctgctcatcacgcgcgcgctggactacttcgatccggcgcgc

SEQ ID NO: 674 - protein, 102 aa, Homo sapiens
ARRAIVTDPDFHGGNFYQHGVIPQRGLRIARMIGHITYLSDDVMNQKFGRAARGSGAEISTQDIEFQIESYLRYQGDKFSSYFDANTYLLITRALDYFDPAR

SEQ ID NO: 675 - DNA, 323 bp, Homo sapiens
acgcgtgtgcgcggcctgatggagcagcagatcggccatctggtgcggctgatcgacgacctgctcgacgtctcgcgggtcagcgagggcaaggtctcgttgcaatacgagtccctcgacctcgcccagatcctgtcgctggcggcggagaccgcgcggccgctgatggaggcctctggccatgatttcgcgttcgacccgccgccggagccggtgacgatcgaggccgaccggacgcggctcgcgcagatcgtcggcagcctgctcaacaatgccgccaaatatacgccggcgggcggccgcatcgagctctcggcgcgcgc

SEQ ID NO: 676 - protein, 107 aa, Homo sapiens
TRVRGLMEQQIGHLVRLIDDLLDVSRVSEGKVSLQYESLDLAQILSLAAETARPLMEASGHDFAFDPPPEPVTIEADRTRLAQIVGSLLNNAAKYTPAGGRIELSAR

SEQ ID NO: 677 - DNA, 730 bp, Homo sapiens
  misc_feature (14): wherein any n is one of a or t or g or c
gctctgctgcggcnggagttccatcagcaccagcacacacaccagcacacgcaccaacacacacaccagcaccaacacacattcgcccccttccccgcagggctgcccccgacgccgcccgccgcacccccgccgtttgacaagtatgcgcccaagctggacagcccctacttccgacattccagcttcttcccgtccttccctcctgccatcccgggactgcccaccctgctcccacaccccggccccttcgggtccctgcagggcgcttttcagcctaagacttcaagccccattgaggtggcccgccgggctggtgcggttcacacactcctgcagaaagcgcctggggtgtctgacccgtaccgggcggtggtcaagaagccggggaggtggtgtgccgtgcacgtgcagatcgcctggcagatctaccgtcaccagcagaagataaaggagatgcagctggacccccacaagctggaggtgggtgcaaagctggacctgttcggcagaccccctgccccgggcgtgtttgcaggcttccactacccacaggacctggcccggcccctcttccccagcacaggtgccgcccatcctgcctccaacccatttggaccctcagcccatcctgggcagcctgagcagccacgcctttgggggcctgggcagccatgcactggctcccggtggcagcatctttgcccccaaggagggctcctccgtgcac

SEQ ID NO: 678 - protein, 243 aa, Homo sapiens
  VARIANT (5): wherein Xaa may be any one of Arg or Gln or Leu or Pro
ALLRXEFHQHQHTHQHTHQHTHQHQHTFAPFPAGLPPTPPAAPPPFDKYAPKLDSPYFRHSSFFPSFPPAIPGLPTLLPHPGPFGSLQGAFQPKTSSPIEVARRAGAVHTLLQKAPGVSDPYRAVVKKPGRWCAVHVQIAWQIYRHQQKIKEMQLDPHKLEVGAKLDLFGRPPAPGVFAGFHYPQDLARPLFPSTGAAHPASNPFGPSAHPGQPEQPRLWGPGQPCTGSRWQHLCPQGGLLRA

SEQ ID NO: 679 - DNA, 222 bp, Homo sapiens
  misc_feature (1)..(175): wherein any n is one of a or t or g or c
nngttccaactcatccataagcgggcgggaagcacctcctggngacgggtcgctgagtcccaggctgccaccgtcctctttctgcacgccacacagaaggacctatccgacttccaccagtccatggcanngtggctggcctacagccgcctctaccagagcctggagttcccangcagccgcctcctgcaccccatcaccagcatcgagtaccagtggatc

SEQ ID NO: 680 - protein, 74 aa, Homo sapiens
  VARIANT (1): wherein Xaa may be any one of Leu or Ser or Trp or Pro or Gln or Arg or Met or Thr or Lys or Val or Ala or Glu or Gly
  VARIANT (15): wherein Xaa may be any one of Arg or Gly
  VARIANT (44): wherein Xaa may be any one of Leu or Ser or Trp or Pro or Gln or Arg or Met or Thr or Lys or Val or Ala or Glu or Gly
  VARIANT (59): wherein Xaa may be any one of Cys or Arg or Gly or Ser
XFQLIHKRAGSTSWXRVAESQAATVLFLHATQKDLSDFHQSMAXWLAYSRLYQSLEFPXSRLLHPITSIEYQWI

SEQ ID NO: 681 - DNA, 507 bp, Homo sapiens
  misc_feature (1)..(244): wherein any n is one of a or t or g or c
nacgggctgggcatccccgcctgtcaggacctgcgctgccgagagnaccagtggtactccctggaaccccgcactgagacctacccagaccgaggccagtgccacctccagttccaactcatccataagcggagagccacttcggccagccgctcgcagccgagctacaccgtgcacctccacctcctgcagcagcttgtgtcccacgaggtcacccagcacgaggcgggaagcacctcctggngacgggtcgctgagtcccaggctgccaccgtcctctttctgcacgccacacagaaggacctatccgacttccaccagtccatggcgcagtggctggcctacagccgcctctaccagagcctggagttccccagcagctgcctcctgcaccccatcaccagcatcgagtaccagtggatccagggtcggctcaaggcagaacagcaggaggagctggccgcctcattcagctccctgctgacctacggcctctccctcatccgg

SEQ ID NO: 682 - protein, 169 aa, Homo sapiens
  VARIANT (1): wherein Xaa may be any one of Asn or Asp or His or Tyr
  VARIANT (16): wherein Xaa may be any one of Asn or Asp or His or Tyr
  VARIANT (82): wherein Xaa may be any one of Arg or Gly
XGLGIPACQDLRCREXQWYSLEPRTETYPDRGQCHLQFQLIHKRRATSASRSQPSYTVHLHLLQQLVSHEVTQHEAGSTSWXRVAESQAATVLFLHATQKDLSDFHQSMAQWLAYSRLYQSLEFPSSCLLHPITSIEYQWIQGRLKAEQQEELAASFSSLLTYGLSLIR

SEQ ID NO: 683 - DNA, 768 bp, Homo sapiens
gccgcctcccagcgcagctcatccctggcttccaacaggctgaagattgccctgcagaacctggagatctgcttccacgctgagggctgtggcctgccacccgaggccctgcacactgccaccttccaggctctgcagagggacctggagctgcaggcggcctccagccgggaactcatccggaagtacttctgcagccgaatccagcagcaggcagaaaccacctctgaggagctgggggctgtgacagtcaaggcctcctaccgcgcctctgagcagaagctgcgtgtggagctgctcagcgcctccagcctgctgcccctggactccaatggctccagcgacccctttgtccagctgaccttggagcccaggcatgagttccctgagctggccgcccgggagacccagaagcacaagaaggaccttcacccattgtttgatgagacctttgaattcctggtgcctgctgagccgtgccgcaaggctggggcatgcctcctgctcaccgtgctggactacgacacgctgggggccgacgacctggaaggcgaggccttcctgccgctgcgtgaggtgcccgggctgagtggctctgaggagcctggtgaggtgcctcagacccgcctgcccctcacgtaccccgcacccaacggggacccaatcctgcagctgctggagggccggaagggtgaccgagaggcccaggtctttgtgaggctgcggcggcaccgggccaagcaggcctcccagcatgccttgcggccg

SEQ ID NO: 684 - protein, 256 aa, Homo sapiens
AASQRSSSLASNRLKIALQNLEICFHAEGCGLPPEALHTATFQALQRDLELQAASSRELIRKYFCSRIQQQAETTSEELGAVTVKASYRASEQKLRVELLSASSLLPLDSNGSSDPFVQLTLEPRHEFPELAARETQKHKKDLHPLFDETFEFLVPAEPCRKAGACLLLTVLDYDTLGADDLEGEAFLPLREVPGLSGSEEPGEVPQTRLPLTYPAPNGDPILQLLEGRKGDREAQVFVRLRRHRAKQASQHALRP

SEQ ID NO: 685 - DNA, 830 bp, Homo sapiens
  misc_feature (21)..(36): wherein any n is one of a or t or g or c
aataaccctcgggcagtctgnacccngagctcggantgctaaacgttcaccctctccctccctccccaccctcccaaccctcaaagagacccccagtgtgtgtggctccccctacgcgtcaggaacatcgggccattcaagcagcctttaggttatagagatgatttacagtcacatggaaggagagttttgcttaaaactggtagaagaaataggtaaagtaagtgggaaatgaggtaagcttgctagctacacaaatcatcttcacaactcgaagctcaaataccctcagtgttcagctggtgtgtcttcactatttgatgtgcagtaaatattctcgcttctttttcactataagagcaacgtcattttcagtgtccacaagctggattcacgtagatcccccaaatccttaaacatctgtgaccgttggtgtataaacggtcgaagcatttgatcaacttccggaggttggtgccgtctgagtctgaaaagctgccctcttgccgtgttcatgctttggtagaacaccttcagagccttggcaagctctcggtcagagccggcttgctgtgtgcacatttggctcatctccccggcggatggcagttgcgcagtcatcccgctgatcttcagagtgttggaaggcttcggggcttgaccagaagcaattttcgcaagtgatgctttgagaagcacgttctcctctctcagggctctgttaatgttcctgagcggttccgtctcctgctctagcctgagcagcttcagataaagttctggtatctggtttgatgctgcctggcttatatccttcacagtggaaattt

SEQ ID NO: 686 - protein, 89 aa, Homo sapiens
MTAQLPSAGEMSQMCTQQAGSDRELAKALKVFYQSMNTARGQLFRLRRHQPPEVDQMLRPFIHQRSQMFKDLGDLRESSLWTLKMTLLL

SEQ ID NO: 687 - DNA, 1590 bp, Homo sapiens
gtgtgtgctgcgtgtgtctcagtgacgtgggaaggaatggcagatgctacaacagtgcagactcggcaccccatttatagaatgttctttttatatactatggaggaatctccactcaccttccactccacgtggtccctgtctcctgtccttgggacagagcagatccatttatattctcacatacaaccggatggatagccattccttttcttaatttgattcctgccaacaccctaaccgtcatgacttcaccttttaccatgggtggcttattaaaaacattttcctggacgaagacagttccctccccaagcggaattcgagtgccatctcttaaggtgatgcatttttaattcccactgcacaagccaggcatcacaatgaccatattcaccactcgttgtcaggggtacaccttttggaaggcagcgtgggctaatgtgaatggtactagtctgagtcagatccagttcaaatccaggtaacttaaagcttgtgtgacccagggacactttacttcaacttgttaaaccttaattttgtcacctataaatgtgatacataaacaaacttgaatgtgtcgcacttaaccacatgcctggctttccataggttcctttcctcttgcttcccccactgtgagcaacacaagcatcgccttcttgtgatcatggctcagtgccaagggataaaagctggcagacagcagctttacagctgggaaaaagagctgctgggggcagggctggcggtagctcaagcatgctgtggttcaggctaatgactggaaggtcccatccatccttgagattttatgacgctatgtgcaagatctagcgaacgtatttggctaagaaaaatcctggaggagagactgcctcagacaactggggggctggaaagccgacctggaaagcagcctgaccttggatgatttagcacctgggttttttggctcttcctgtattaggtttgctggcttcgcatcaaatggaaggaggtggtgccagggacgtgaattaaacctgtcaaatagagggtgaggggagtgcagaaggctgggggaaggaggggctgtgtggggaactctgatagtctgacagcaccatctggacttggcagggatgacagccctgagatcagatggaactaaccaataaagctgctaaaattctgctgtcctgggcctatccggagtgggactcccgtaatctcctatttagaaggaacactgatctgcaaggggagagctggggcccttaatcattctgcagagctgataacggtcactgtggaggcaggactaggcgggtgcctggtttgcttagtcccaccttgaggtcccgagttccagtggtgtgccgaagtggtttgcactggcccatgagagtggattgttgaatttccaggaattttgtaagctggttggtaaacacagccacagtgaccattagagattatattaacctgcaattaaataaagtatgttaaaaacagtaataaatactcaaaactcatcacttcctaattattttactattatctatgttcttgaggatactgacatctattgtattggtatggtgt

SEQ ID NO: 688 - protein, 57 aa, Homo sapiens
MLQQCRLGTPFIECSFYILWRNLHSPSTPRGPCLLSLGQSRSIYILTYNRMDSHSFS

SEQ ID NO: 689 - DNA, 669 bp, Homo sapiens
ttttttttcagagataagccaaaccattttattgataattcaaactagaaagcagaagggatgtttagggagaaaatccatcctatttaccagcttgaggctgatgttctgtcctctgactgcagtttccagaaaagtccttgatttttgaggtagaaaattcattctggaagatcttagaagcacagctgaaactcctccctccctaatcctgctggaagagctgaccacatattgggagaagaattgggggagtctttccaagaattgcaggtcacttgtattcttgaaccgacggtggttttgggctgcctcccactgaagttggaggaaagcttgggaccaaaagtcttcatgttgcacttagatgcagtccttgcttctctcactagcaggacagattgtatgcaatcaatctccagcatttccaagttaaggccaaattgccctttcaatgtcgaagccccctctcactggagaatggttcattctcaggcagtcattccaccacattccttctccagcatcttccggctctcaacacgagatttaaaactggtccagttcccaggccagatgctcatgagttcatatttcacactaagaaaaccttgataactaacatctgcaaagaccctatttccaaacatggccacattcacaggtacc

SEQ ID NO: 690 - protein, 86 aa, Homo sapiens
MLHLDAVLASLTSRTDCMQSISSISKLRPNCPFNVEAPSHWRMVHSQAVIPPHSFSSIFRLSTRDLKLVQFPGQMLMSSYFTLRKP

SEQ ID NO: 691 - DNA, 271 bp, Homo sapiens
tgtacagaacaatggcaagggtagcacaaagaattctcgtatataagacactcagattcctcaatattatgtttcaccatgtttgctttcttctctcatgtgtgcatattacacaaatatacattattattttctaggtgtcagagagtacgtgacagacaggctacccttttatctccatgaacttcagtgtttgcttctttttttttttttttttttttggaaagggatttttgctcttccccccgggggggattacgggggaaaaacc

SEQ ID NO: 692 - protein, 58 aa, Homo sapiens
MCAYYTNIHYYFLGVREYVTDRLPFYLHELQCLLLFFFFFFWKGIFALPPGGDYGGKT

SEQ ID NO: 693 - DNA, 432 bp, Homo sapiens
tgtacaccaccatacctggctaagtgttaaatattttgtagagatgagggtctaactatgtgacccaggcttgtctgctgggctcaagtgatcctccttcctcagcctcttgaggaagttctgggattgcaggcatgagcaactgccccggccttttttcctttttctttccatttgtttgtggaagaaaaggtggggagggtcttatcatttttcctgcagcatttctcacattttaatcatgggattgcatccctgtgggaaaccaaaatgctgcttgtatacccagccccatgggggcatatggccctggggtgttgtataatatgtataattatatccaaattttagcccttcaggaagactttggaatggcagtttcttctctcttgggagaagagatgatataacttattactgaaattagaacaa

SEQ ID NO: 694 - protein, 51 aa, Homo sapiens
MIRPSPPFLPQTNGKKKEKRPGQLLMPAIPELPQEAEEGGSLEPSRQAWVT

SEQ ID NO: 695 - DNA, 342 bp, Homo sapiens
actagtctcctgcactaggccccagcaggccagacaccagaatggagtcagttgtgctaagtgcagtgtcatcaaactgaactttgaaatgggccagttcccctaaaacattccatttaatctgcatcaacctaagtaataaggaagtcccctctgctttaaccctgtagggaaagtaactttgacatgatcagtccgtgttttgttctgtttctgctttctgccgctcttctctgcctgcaaagccaaccctcctgtgggtgccctgggacctcactcagcatcttcaaagagcctgtgcaccctgctccttccagcttcttcgtggaggggctgagaagt

SEQ ID NO: 696 - protein, 52 aa, Homo sapiens
MISPCFVLFLLSAALLCLQSQPSCGCPGTSLSIFKEPVHPAPSSFFVEGLRS

SEQ ID NO: 697 - DNA, 375 bp, Homo sapiens
  misc_feature (342): wherein any n is one of a or t or g or c
agatctgggaaaatcttccttatgtcatttagggcttcaaacaagtgatttctccctgtttttttttctttggtacactaaaatgacagagccaaattcctcccgtgtgtatctgcgtttcacacacatgcacactgcagagaagttgagttgaggacatttcttcactctcagcggagagctccctgctcctgctttctcactgagactgtgcagattgtgtgggtggcgagttggttgtgcaaggccttgcttgctttgagtcacggacatgtgggttgtcaaatccattcctccgtgcttgcttcctctctcaacctcaaagggctggagacagtcttnatatccagatgccgcgggtccttgctccgagag

SEQ ID NO: 698 - protein, 84 aa, Homo sapiens
MDLTTHMSVTQSKQGLAQPTRHPHNLHSLSEKAGAGSSPLRVKKCPQLNFSAVCMCVKRRYTREEFGSVILVYQRKKNREKSLV

SEQ ID NO: 699 - DNA, 315 bp, Homo sapiens
  misc_feature (1): wherein any n is one of a or t or g or c
ngctagccatggagaaagaaaagactacatcgggacgttttcgaagatgccttggaaaccatctcaatatcttctcactcagatatggcaacaagcagccttcactttgcatcatgtgatacacaacaggcgcccagacagcgcggagcgtctactgtcagcagttcatcatcaaccaaggtggatctcaagagtggcctcgaagaatgtgctgtggcattgaacttatttctaagcaacaaatttacagacgccttagaattgcttcgcccctgggctaaggagagtatgtaccatgccttgggctacagtact

SEQ ID NO: 700 - protein, 59 aa, Homo sapiens
QRGASTVSSSSSTKVDLKSGLEECAVALNLFLSNKFTDALELLRPWAKESMYHALGYST

SEQ ID NO: 701 - DNA, 478 bp, Homo sapiens
  misc_feature (450): wherein any n is one of a or t or g or c
tgatcattggcttgaaggaaatatctctgagacagggcattgataacaaagcaaaatggagtttttggtttctgttttggggcagctatgctcaccttcgagatgtaggtcagctgcaaagctccaacagctcctgcccccattgccagattctgggggttgtccatataccagaggaggcagttagcctgggtgtccagaatgaagtacctccgcagaaacttgccgctgttctcatgctcctcgatgtccagaaacccacagattcggttctgccgatccacataaggcattcctgggctctgctcacatcaccctggggacgttctctgctctcctcccctcccgcagcccgggcagtcgttgcggggtcggtgccccagcgccagaacccgcagagaagtttcgctgcccccccgtgcaggggccggggctcgggcggggcgcgtnacatcgggcggggtcgcccctctggcca

SEQ ID NO: 702 - protein, 114 aa, Homo sapiens
  VARIANT (2): wherein Xaa may be any one of Leu or Ser
MXRAPPEPRPLHGGAAKLLCGFWRWGTDPATTARAAGGEESRERPQGDVSRAQECLMWIGRTESVGFWTSRSMRTAASFCGGTSFWTPRLTASSGIWTTPRIWQWGQELLELCS

SEQ ID NO: 703 - DNA, 518 bp, Homo sapiens
  misc_feature (1)..(98): wherein any n is one of a or t or g or c
nntagaaaaacaattttatttacagtatcttcaaaaagcataaaatactcatgaataaacnnaacaaaagatggacaagatctctatgttgaaaacnntaaacaattattgaaagaaattaaagaagacacacacacacacacacacacacacgtatcatgtttgcagattggaagactcaatgttgttgagatgtcagttctccacaaattgatctgtagagttattgcaatcccagtaataatgctacaggaatctgttgtagaaatttacaaattgattctaaaatttatatagacatgcaaagaatctagcgtatctataacaatcttgaattaggaaaataaatctggagtgctcaaactacatgactttaaaacattataataccgacattgtggttttataattaagacagtatgttactggcatagggactgacaaatagatcagtggatctgagaagagagctggaaacaggcccatgattacatggtcatttgtttgccaaaggtacc

SEQ ID NO: 704 - protein, 80 aa, Homo sapiens
  VARIANT (3): wherein Xaa may be any one of Leu or Ser or Pro or Gln or Arg or Ile or Thr or Lys or Val or Ala or Glu or Gly
  VARIANT (15): wherein Xaa may be any one of Phe or Ser or Tyr or Cys or Leu or Pro or His or Arg or Ile or Thr or Asn or Val or Ala or Asp or Gly
INXTKDGQDLYVENXKQLLKEIKEDTHTHTHTHVSCLQIGRLNVVEMSVLHKLICRVIAIPVIMLQESVVEIYKLILKFI

SEQ ID NO: 705 - DNA, 424 bp, Homo sapiens
agatctaaggcagaggtgggagaaagttcaaagaacctttggagaacatggagcagcctgatggccaaaatgcaatgaagataattggagaaaagctttgaaaataaagaggcctcaatgaactgaacctgcttgctcaactacagatcacccttcactctgaggataatgagaagctcagaggggttaagcaggagaatgggatcacattgtatcatcactttatgggaaagccaggtatgcaggaatggaaataagaactccagaagctgcagcagacacaggcaaggaataatgaggaaaagcctaaattcagccagtgctagaggcaggaacttgaagggagtatcaaacaggatttcatgaccagaggacgtcagggagaacatacttataccacatgagcagagaaaatattaccagt

SEQ ID NO: 706 - protein, 82 aa, Homo sapiens
MFSLTSSGHEILFDTPFKFLPLALAEFRLFLIIPCLCLLQLLEFLFPFLHTWLSHKVMIQCDPILLLNPSELLIILRVKGDL

SEQ ID NO: 707 - DNA, 234 bp, Homo sapiens
  misc_feature (48): wherein any n is one of a or t or g or c
cctaggaaccaacaacagtaaaaaaacaaaaaatacaaagaaggacantacatcatgataaagggatcaattggggatcataatctaaccaaggaggtgaaagatccctacaaggagaatacaaaactgctgaaaaaaattatagatgacacaaacaaatggaaaaacattctatgctcctggctgggaagcattaatattcttaaaacagctatactgcccaaagcaatgtac

SEQ ID NO: 708 - protein, 60 aa, Homo sapiens
MIKGSIGDHNLTKEVKDPYKENTKLLKKIIDDTNKWKNILCSWLGSINILKTAILPKAMY

SEQ ID NO: 709 - DNA, 330 bp, Homo sapiens
  misc_feature (1)..(313): wherein any n is one of a or t or g or c
nagttcacagagacttacctgactgntttgtcagatagcctgtatatacctatttttagcaccttcttcttcaattcacctcatcaaaaagatactaacatgggtagagaaggccaggatacacaaagcaagcctttgaatctgctcaccgtgtgggattggtcggtgcagnttgaaacccaagnccagcacattgctcaaaaacccctcttatgtggaaaagccaaactggacagaggccancggaacgaatgcgnnctcaacattcacnnnacactttcttgccacttacacaatctacgtcatctcccanaagaggatttttcaggg

SEQ ID NO: 710 - protein, 77 aa, Homo sapiens
  VARIANT (25): wherein Xaa may be any one of Ile or Leu or Phe or Val
  VARIANT (29): wherein Xaa may be any one of Ala or Asp or Gly or Val
  VARIANT (48): wherein Xaa may be any one of His or Gln
  VARIANT (53): wherein Xaa may be any one of Ala or Asp or Glu or Gly or Val
  VARIANT (58): wherein Xaa may be any one of any amino acid
  VARIANT (72): wherein Xaa may be any one of Glu or Gln or Lys
MGREGQDTQSKPLNLLTVWDWSVQXETQXQHIAQKPLLCGKAKLDRGXRNECXLNIHXTLSCHLHNLRHLPXEDFSG

SEQ ID NO: 711 - DNA, 375 bp, Homo sapiens
agatctgcaagacgctgaagtgataaaagaacatgaggccagttgagagaagagcccaccggaaactgctgaggggctctggagtgtaagcacctcctttccaaagcaggtagatgggtaccacgtagagcataacatgctaaatgtagtaaatctccaattcaaaggggagcagccgagtgtttaccacaggaaacagcaatgccagaagagctccattcaacatgtgcatctgtagcttgaagacgacgatagctccccgacatggagggcaggccaggagaaagatcggcagctcggcccgcggccccgggatcgggctactgctccgctcccgcgctctccgcgccgggcgctcggttcccctggcggccg

SEQ ID NO: 712 - protein, 50 aa, Homo sapiens
MCICSLKTTIAPRHGGQARRKIGSSARGPGIGLLLRSRALRAGRSVPLAA

SEQ ID NO: 713 - DNA, 527 bp, Homo sapiens
ggatcctcagagcctagcacagagctcagcacatagtaagtgttcaataaatatgtgatgaatgaatggacactcatctcccttagatgccccacataccatgttggcctctcttaccatgaacagcaacactcgtgactacagcatagagatattttttaaaccttacatttacactaactttcctgtgctttgttggggaagcatttttgaaccattcatatttattaattttcatgcagcaggggataatttgaggattttttttttcaggggctactgagctcctgggctcccattcacctcttgatctcctcccctgaccaccagtacctgctcaactctggccgcattccccatcagatgggttcattgtgagccccacaccaagatgcatcaatgcctctgtgctttttgttttcatgatgttttacaaggacacaatcatagtgtaattaaacaaagagaagattatttaaaggtgctttcagctacagactctacgctgtgctctcaccaacaggagc

SEQ ID NO: 714 - protein, 73 aa, Homo sapiens
MNGHSSPLDAPHTMLASLTMNSNTRDYSIEIFFKPYIYTNFPVLCWGSIFEPFIFINFHAAGDNLRIFFFRGY

SEQ ID NO: 715 - DNA, 589 bp, Homo sapiens
gaattcctagtggaggggggctagaggaggttcctctattacatgcatactggagagtcttcatgaacacccttgcagtcctacaagaacagatgagacagacagctgaccaggcagccatgaacctttccgtctgtgtgaactgtcaccgtgcttatagacacaactccacatgttccgtagaagttggaaaatagaatgtgcctgcagattgtttgggcctgtgagtacaggattcaaacctccttagcagattgctagattgagactctgggtggatgctgaggtctcaagtctcagttcagcttggtttgctgcactgaactcagcacacacatggtcgataactctttcacttggctgccctctctaccctgcactggagaaactgcctcctgggcaactaagctaagaaagctgttgctctcatctggctggtttcagaaggagaaggatgtcaggagtatgcaaaagcttgtttctttgtgcaagtcttcagctgattctgagttgagtattcagcttgttctttcttggagactcctacagcagaggcccctgagaagtccttggttgtttgtgcagatct

SEQ ID NO: 716 - protein, 84 aa, Homo sapiens
MVDNSFTWLPSLPCTGETASWATKLRKLLLSSGWFQKEKDVRSMQKLVSLCKSSADSELSIQLVLSWRLLQQRPLRSPWLFVQI

SEQ ID NO: 717 - DNA, 414 bp, Homo sapiens
  misc_feature (65)..(322): wherein any n is one of a or t or g or c
aagcttcttcactatacaatttgtgttttctctttactaacacccgttctgttgagtagattatnttactatgaaggagaggtaatagtcaacaatatctgttttctttttttcagtatttcttatttcttaatgatnatacaccagtacaaaccttactacaagggattaaacattttagttgaattttttaagcatcatggnntggtgtggaaacagagaaacttctttaggtgcctttgcttagggaatgtccttgcttgtctccctnnttattccttctgcagtgctcagtcacagagactttattgtgggcactatntccttcttttaaagcatttggctcatcctcaacatgtagcttttatatagcatgttgaaaggcgaatgaagtcagatgtcatatattatggg

SEQ ID NO: 718 - protein, 79 aa, Homo sapiens
  VARIANT (2): wherein Xaa may be any one of Ile or Met
  VARIANT (25): wherein Xaa may be any one of Leu or Met or Val
  VARIANT (47): wherein Xaa may be any one of Phe or Ser or Tyr or Cys or Leu or Pro or His or Arg or Ile or Thr or Asn or Val or Ala or Asp or Gly
  VARIANT (64): wherein Xaa may be any one of Ile or Phe or Leu or Val
MXIHQYKPYYKGLNILVEFFKHHGXVWKQRNFFRCLCLGNVLACLPXYSFCSAQSQRLYCGHYXLLLKHLAHPQHVAFI

SEQ ID NO: 719 - DNA, 433 bp, Homo sapiens
  misc_feature (1)..(432): wherein any n is one of a or t or g or c
ngcaccctcctcttgcctctgagcgatctccatcctgtgtgtcctttatatttacacattaatcttcccttttcaagcactgtgctataaatacccttaccacccccactggccctgtccccagcccttttcaggatgcagagaagcatcgtgaccttcgtgtgacctgcccatttggaatcccagaccgctcccccgcaagagttcctcccatgattgctggggccgcttgcccatttcccaagcccacaccaggcggaagggaagagggttcctgtgtntttcatttttatacgatatgtntacagttatgttgctttaatctttttaagtatttaacctttntaaggatnntntagcaacaagtcccttactctgacttctctgtggcagtgatgtgggcaaagcagggcttaggagctccctgggatnt

SEQ ID NO: 720 - protein, 95 aa, Homo sapiens
  VARIANT (3): wherein Xaa may be any one of Asn or Asp or His or Tyr
MKXTGTLFPSAWCGLGKWASGPSNHGRNSCGGAVWDSKWAGHTKVTMLLCILKRAGDRASGGGKGIYSTVLEKGRLMCKYKGHTGWRSLRGKRRV

SEQ ID NO: 721 - DNA, 759 bp, Homo sapiens
tgatcatgttttgcggtggtcattatactcctttcctttcccagttgttttaaaatttgacttccatagagaaactggagaggcctcatgagatgacataccagttcagcctgggtaaagtagtgacatgaccctaaccagactgtagaggggaccagtgctctagtaccttccttgataccattaaatccatgatggaaaggatttaatccaacaatttaatggtatcaaggaaggtactagagcattgtaccatcagcaacgtactgatgccttcccatgcagactacctgctgatactgtgttatgtgggagaaagataagagtctagagcttatgccatggagcatagagcttctctgtggattgaaaacattccactgccctaatgcacaaagttacagggcccacttggaatcgctctctctagctaatgacattccaaccctatcattagcatgatttctaaattgggcattccatttccactcactcagtggagctctgagtacttcactggacatttaattttggaaatgagttttgaaactcagttcgtgaagcctgcagtcgagcaaatgactatatatttgccattaagtttgaggggtttcctttcctatatgctttcagtgatttattttgctttttaaataaagattgtttgtttattacctgaaagttgatactgatttaggaatatattttctgtgattggaatcctcaacaatttattttggaagcttgcagatggctagc

SEQ ID NO: 722 - protein, 64 aa, Homo sapiens
MISKLGIPFPLTQWSSEYFTGHLILEMSFETQFVKPAVEQMTIYLPLSLRGFLSYMLSVIYFAF

SEQ ID NO: 723 - DNA, 471 bp, Homo sapiens
acgcgtgcttcccgcacagcaactgcgcagctccaatcagcctggaaccgctaaacggcttcggtctgagggctaatggaggctaaagagcaccgagtatccgacttacgtgcaccgaacttacagatctctcgccctgttctccctgctctaccctaccgaagccagttcccatcgcgaagtgcaccctcacctcttcccccaagcgacccccctcacacgcattcccttcaaattctcccggcatttgggccgctttgatgatcagatggtagagccctgattacaaatttattcccggccgctctgtccgtctttatctccgctattagggacatctgggagtgattagtgccgcacccgcgcccggccgcgctcgcctatcttgccgcggcggggccggagcctcgctgacgtcagggcagacggctcggagccatcccagccgagttgggtgtaatcggcggccgc

SEQ ID NO: 724 - protein, 61 aa, Homo sapiens
MEAKEHRVSDLRAPNLQISRPVLPALPYRSQFPSRSAPSPLPPSDPPHTHSLQILPAFGPL

SEQ ID NO: 725 - DNA, 719 bp, Homo sapiens
cctaggaaaaaatggtactggacagccggaagtggcatttacttggaaccacacaggaagaagtacatcataattctgggagtttgctgtggcaatttgcaaaggcctttcacacagctggacccctctcacttttcatgaagaaccccccacgcgccggcagacagcggctgcacacacattcaggagattgcaggaaataatttccaacagcaaatgagacattagttattcaatgctgataaacaacaacagcgcttcatccgaaggaattccactgggatctgagttaaagctcagttccgtcctctactcatggtgacctcggacagagtctctgtgcctcgggctcactgctgtaaaatcatgcggcctgtcgatgggtccatgtcgcttgcagcatcttagtcctcattctggaggacacgtgccctcttagcagtgagccctggaggggctgactcgcagtgtctgctgtgttttccagtttccatgatgtaaatgcacagggctgattctgggctgccagtgttttgacaattgatttgcagactgcgtgaaaatttaaaactcagctctcttgagctgatatgagccaccccagcccacccctgcagcaggcacgaacgttagtttgcagggagaggccagctgagctgctgcacagacctgctgggatcatcacagctgtgcgcttcaggccagtgcctcttcctgta

SEQ ID NO: 726 - protein, 63 aa, Homo sapiens
MVLDSRKWHLLGTTQEEVHHNSGSLLWQFAKAFHTAGPLSLFMKNPPRAGRQRLHTHSGDCRK

SEQ ID NO: 727 - DNA, 455 bp, Homo sapiens
  misc_feature (392): wherein any n is one of a or t or g or c
cggccgccgaagtgggctcgggatgcggggctgggaccctcccgattccggggcggattccggacgccgggaccggccattactggtgccgggttgggcttctccagatgccggggctgggtccttcccaaggttgagacaaaaggatgccacggagaaagaaaaaagttaaagaagtctccgaatctcggaacctggagaagaaggatgtggaaactaccagttctgtcagtgtgaagaggaagcgtagacttgaggatgcattcattgtgatatccgatagtgatggagaggaaccaaaggaggaaaatgggttgcagaaaacgaagacaaaacagtcgaattagagcaaagtgttttgccaaaagaaaaatcgcacagatgacagaagnagaacagtttactctggctctcaaaatgagtgagcaggaagctagggaggtgaacagccagga

SEQ ID NO: 728 - protein, 66 aa, Homo sapiens
MPRRKKKVKEVSESRNLEKKDVETTSSVSVKRKRRLEDAFIVISDSDGEEPKEENGLQKTKTKQSN

SEQ ID NO: 729 - DNA, 410 bp, Homo sapiens
actagtcagcttccagttgtgtgactagaacagggctcgatgtttccttaagcttcagccatgcgtggactgacccagcctctggtgtggttggagcagggcagttgttcagttgttcttgtcagcagtggcttgatttcactgtaggatcagccgtgttgggtggtctgggtattgttgactggtccactggtcctgggcagtggctgctgttggtttcagctggctatgaagaacccaaggtatgatacctgcaacatggttcagatgtctgtgcactgctcctgtgactgtcctgcaaccctttccactggttcctttggtgctgtcaggggaaggctctggaatgcgggagggccattctccttccaggctgaaactctcccagcggtgccaaggaccccagatct

SEQ ID NO: 730 - protein, 60 aa, Homo sapiens
MKNPRYDTCNMVQMSVHCSCDCPATLSTGSFGAVRGRLWNAGGPFSFQAETLPAVPRTPD

SEQ ID NO: 731 - DNA, 417 bp, Homo sapiens
  misc_feature (1)..(225): wherein any n is one of a or t or g or c
nctacgggagaggcaggtgggaccatgtgatgggggtggattcaagagacacgaaacagaatggacaagaaagagcaactgctggatgcggggaagggaatcaaatttgagcaattcagcagatggtagagcccttctctgagaagaataggaggaagttcggtctgaaacacagcaagccagaaggatgtggacaatcaagtagagatgcctggtgtgcggtgnggcctggagcttagaaacatctgggctgtacataatattgtttggggagtcatccacgaataggtagaaagtgaatctgctactatgttgcttttgcccacgaattgatctgatatcccaggtactcaggaagccgacgcaaagagatcccttgagccctggagctggaggttgcagtgagccgagattgca

SEQ ID NO: 732 - protein, 86 aa, Homo sapiens
  VARIANT (12): wherein Xaa may be any one of
  VARIANT (86): wherein Xaa may be any one of
MYSPDVSKLQAXPHTRHLYLIVHILLACCVSDRTSSYSSQRRALPSAELLKFDSLPRIQQLLFLVHSVSCLLNPPPSHGPTCLSRX

SEQ ID NO: 733 - DNA, 285 bp, Homo sapiens
ctagccgcgcagaccttgagggcccgaggtcccaatggagtcgccgttgtgcggtctatggcatctggaggtggtgttcctactgatgaggagcaggcgactgggctggagagggaggtcatgatggccgcccgcaagggactggacccatacaatatacttgccccaaaggcagcctcaggtaccaaggaagaccctaatttagtcccctccatcaccaacaagcggatagtgggctgaatctgtgaagaagacaacagtactgtaatctaggtttgggtgcac

SEQ ID NO: 734 - protein, 79 aa, Homo sapiens
LAAQTLRARGPNGVAVVRSMASGGGVPTDEEQATGLEREVMMAARKGLDPYNILAPKAASGTKEDPNLVPSITNKRIVG

SEQ ID NO: 735 - DNA, 198 bp, Homo sapiens
  misc_feature (38): wherein any n is one of a or t or g or c
tgccagtgctcaccccagagaggttcctatcggcccanatcctggtgtcagcggacatctccgggtcggtgtgccttgcttgtcgccagctccaggccccggacggcagttcagaagtctcattgcgcaatctgggacaagccaaatgctagcatcttcaaaatcaccatgattcagctgaaggaggacttgggatcc

SEQ ID NO: 736 - protein, 66 aa, Homo sapiens
  VARIANT (13): wherein Xaa may be any one of Arg or Ile or Lys or Thr
CQCSPQRGSYRPXSWCQRTSPGRCALLVASSRPRTAVQKSHCAIWDKPNASIFKITMIQLKEDLGS

SEQ ID NO: 737 - DNA, 306 bp, Homo sapiens
  misc_feature (1)..(2): wherein any n is one of a or t or g or c
nngtgcacacgtaccctagaacttaaaggataaaaatttaaaaatttttttttttttttttttttttttttttttttttttttaaaaagggatcccccccttcccccccggggggaaggggggagtggggggggaaattctcgttttttgagaacccgtctttccggggtttccccccttttttctgcccccgccccccgaaaattggggaaaaaagggggccccccaaagccccgggatatttttttttttttaaaaaaaagggggttttccttttttccggggggggtctcccccctctcccct

SEQ ID NO: 738 - protein, 91 aa, Homo sapiens
KFKNFFFFFFFFFFFFLKRDPPLPPRGEGGSGGGNSRFLRTRLSGVSPLFSAPAPRKLGKKGGPPKPRDIFFFLKKRGFSFFPGGVSPLSP

SEQ ID NO: 739 - DNA, 464 bp, Homo sapiens
tgtacagatgcagccactacaagggccccttttaatctgctgagggctctgttccttgctcttttactctttgcaaccccctcctcattttagggaacctgtgtatgctgtgaaattgcagtgttccttccttccctcttcatcttgcaaggcagcgatataatgctgacaataattataattaagatgctttgtgcaagaagaagcagtttgcaatgcttcctcctgtttcccagcctaccagcaattcaaagaatgctgcttgatcaaagaaaatatgccaacaggagagtggacctgcacagctccaggctgtggcagggcagcctcaacagttttccttatctaggacccaggttctctactcacgaaaggaacccgttcttttactgctcggctgcgagatgggaaatccatcagttgagctgagcctcagataccaatatcttgcaccttgaccgcgg

SEQ ID NO: 740 - protein, 88 aa, Homo sapiens
MLTIIIIKMLCARRSSLQCFLLFPSLPAIQRMLLDQRKYANRRVDLHSSRLWQGSLNSFPYLGPRFSTHERNPFFYCSAARWEIHQLS

SEQ ID NO: 741 - DNA, 457 bp, Homo sapiens
  misc_feature (1): wherein any n is one of a or t or g or c
nttctaactgctaagtacacagtcttatataatggccattagttaaataatatactttaccttgaagccttgaaggacaatgtccccatctcagagatgtcacttccaagttggtgcttagctctgccctcaggagaccacatgatgtatggtagaaacagtacattccttggttatttatcattgtcacctctccttctaaaagtgtgacccttggtcctaggagatgtttttcaagatttatgaacctttgagtggtggtgctttgcaaggtgctgtgggaaagacagagagttctatgccaagaataattcaagtcggggcaaatcactactccttttagtaggtaagtggtctgatgttttcaacttgcctccaagtggctagttggtctctttggtggatggtaccatcatccgtcaagtgctcaacattgatctctgcttttgacagatct

SEQ ID NO: 742 - protein, 57 aa, Homo sapiens
MINNQGMYCFYHTSCGLLRAELSTNLEVTSLRWGHCPSRLQGKVYYLTNGHYIRLCT

SEQ ID NO: 743 - DNA, 493 bp, Homo sapiens
  misc_feature (474)..(493): wherein any n is one of a or t or g or c
gctagctaatgtcctggggaggtggcattgttactgaattgccctgcctggagcttacttttacccagatcaccctgggcgttgccaaaggctttaagacagggctgtgcccagggcagagactgagcacacagtgtgtgcttaaaggctctgtcagacctgctgctggaagcttggagtcagtctctctcatgagggcagttctctctggccacaggtcctcgagcccctcgacatgacaaccccgcccagcatctccaggttccatccctcttcttgaggcaggacacaggtctcagaaggggcagatccagagtcaagagtgtgctagagcctacgtggcatggctttagccccacatccaaaccctgcgtagatatgcacagcgggagagagccattgcctccttggcaaggcaccccctccacataaggagagacctcagcactcccatctgtgcatacaaagagggcnactagagaggtttgtgcgn

SEQ ID NO: 744 - protein, 88 aa, Homo sapiens
MEPGDAGRGCHVEGLEDLWPERTALMRETDSKLPAAGLTEPLSTHCVLSLCPGHSPVLKPLATPRVIWVKVSSRQGNSVTMPPPQDIS

SEQ ID NO: 745 - DNA, 886 bp, Homo sapiens
  misc_feature (1): wherein any n is one of a or t or g or c
nggatccagagcagcgagaagctgagcgcggttattcgcgtagtggagggaggaagcggcctgaaagtggtggctctggccagactgacacccataccttttgggcttcagaatgcagtgttttcgattactgatctctcattacccaactatctgatggcatcttcggttggactgcttcctacccagcttctgaattcttacttgggtaccaccctgcggacaatggaagatgtcattgcagaacagagtgttagtggatattttgttttttgtttacagattattataagtataggcctcatgttttatgtagttcatcgagctcaagtggaattgaatgcagctattgtagcttgtgaaatggaactgaaatcttctctggttaaaggcaatcaaccaaataccagtggctcttcattctacaacaagaggaccctaacattttctggaggtggaatcaatgttgtatgattctaatgagatacgtgattgtcaagagcctagtgtgctatctaaggtctagcagtcacttcactagtgggcagagacaagttctaattgtattacagcacaaacaaaactgactagtttttaaattgcacaatttttttttttttaagcaagaatcattttctgggtatgtaagtgtaaatgtagatgcaaatttggctgcacctctttatcatgcctgtattggcctataggtctgcactttagtgttttttaattgttttatttctgtgtatttacgaacagagaaataactcaaatattatttctgcttagtgtctttatttataaagcccatgagtagtttgtatgcatctttcctacttgtaaagatgagtaaaagtatgcagttttaaatttaaaaaaaaaaaaa

SEQ ID NO: 746 - protein, 157 aa, Homo sapiens
  VARIANT (1): wherein Xaa may be any one of Arg or Gly or Trp
XIQSSEKLSAVIRVVEGGSGLKVVALARLTPIPFGLQNAVFSITDLSLPNYLMASSVGLLPTQLLNSYLGTTLRTMEDVIAEQSVSGYFVFCLQIIISIGLMFYVVHRAQVELNAAIVACEMELKSSLVKGNQPNTSGSSFYNKRTLTFSGGGINVV

SEQ ID NO: 747 - DNA, 407 bp, Homo sapiens
  misc_feature (404): wherein any n is one of a or t or g or c
gtcgacctcagacatagctagacacatgcctcttatcagatacatgatttgcaagtattttctccctattgacggtactcacccttcttgcgatgatgtgagataataaaatgcctacatgatgagatgaagtgagatgaaaaacataggccttgtgatggaatgggaaattccagagataatttgtaagttttacactgtgagccactctgagtgttgtgatgaaatctcacccatcccgctccaccccgcctgggattgctgtcagtcacttagtagccctctgggttatcagaccccctgatactgcagtgcttgtgttcaggcaactctcatttcacttaataatggcccaaaacacaactgttgtgaggtactattttctgattgtggaaccaccggtnact

SEQ ID NO: 748 - protein, 62 aa, Homo sapiens
MKSHPSRSTPPGIAVSHLVALWVIRPPDTAVLVFRQLSFHLIMAQNTTVVRYYFLIVEPPVT

SEQ ID NO: 749 - DNA, 401 bp, Homo sapiens
cccggaaagggtgcgactaaaactctgttatatcagacctactatgagtgtacagggactcatacaggaacttgtgtctataaccagacttgttactcagtctgtgatcctggaaacaggcaaccctaagtatgttatgacccagagttcttgccctgtgatttctcatttgaagtccaaattggcaaatccctaatgccatcatatacaaaccccacagaaaccggggtcaataaacttgtaaacaaaacagaagtattcccttacttgcataaagggcctgtctccatatattttgatgcctgccaagctgatgtatgtggaggtactaatatagaagatcaatggccctggaagccagagaactgatgccacaggacagttttaccttgcctgaattc

SEQ ID NO: 750 - protein, 79 aa, Homo sapiens
VCYDPEFLPCDFSFEVQIGKSLMPSYTNPTETGVNKLVNKTEVFPYLHKGPVSIYFDACQADVCGGTNIEDQWPWKPEN

SEQ ID NO: 751 - DNA, 315 bp, Homo sapiens
gcgcgccgaggatggagagagcgatggagcaactcaaccgcctgacgcgctcgctgcgccgcgcgcgcaccgtggagttgcccgaggatacattggctggctgtgaatgggcggacagaactactccatgaccttgtgcagcatgtcagtgatgttgatgttgaggatgccatggggcagacagcactgcatgttgcctgccagaacggtcacaagacgtcatggtcagagagatacagcacagatcctactattacgaggagccaaatatctgccagataaaaatggagtaactcctctggatttatgtgtaca

SEQ ID NO: 752 - protein, 69 aa, Homo sapiens
MGGQNYSMTLCSMSVMLMLRMPWGRQHCMLPARTVTRRHGQRDTAQILLLRGAKYLPDKNGVTPLDLCV

SEQ ID NO: 753 - DNA, 415 bp, Homo sapiens
ccgcgggggctgcagtccacgggtccgaaggcttaactctgcgcgcaaagcgccgggatgcgaacgcgggatctggagctcgtcggtgccgagagctgccagagagttggattctgcgtgcagctgccggactcggccccatgtttttgctctcagaaagagttggtgatgaagtttgggcagaaatcccctgtcggccgtccgctccacgcttccctcggggccgacactgccaacctctccgggcactgaggacacctctgcgccctggagcggtgggaggacgcggagcgccgttctctggcttccgacaccctgcccgccctctctagtgggtctgtggctgcgccctctcgaaggaagtaataaatctttctgaccttgggggtcagaggagacgcttcagttttccgga

SEQ ID NO: 754 - protein, 64 aa, Homo sapiens
MRTRDLELVGAESCQRVGFCVQLPDSAPCFCSQKELVMKFGQKSPVGRPLHASLGADTANLSGH

SEQ ID NO: 755 - DNA, 322 bp, Homo sapiens
  misc_feature (1)..(3): wherein any n is one of a or t or g or c
nnncgtttctggtgagtagggggccctctcctgccctactcatgtctgcctgactacctactgtaacacatgtctgtctctcaaatcgtcggtaaagtccacttaccacacaaaaggcctcctgggaggtgtgtgtgtgtgtgtgtgtgtgtgtgcatgcacacagagtgggagagagccagactaatatatctgagtcaaagaattacagagcagaagaagcggggtggacgggggggaatcccagcactttgggggggcgggggagacagatcacttttgagagctcgggagttcgagaccagccacagcaacatcgcga

SEQ ID NO: 756 - protein, 84 aa, Homo sapiens
MSVSQIVGKVHLPHKRPPGRCVCVCVCVCMHTEWERARLIYLSQRITEQKKRGGRGGIPALWGGGGDRSLLRAREFETSHSNIA

SEQ ID NO: 757 - DNA, 738 bp, Homo sapiens
tttttttttttttttacaagcctccatttttattattaaatttgtcagatattactttttaaattcctacacagtttctaaatggttactctcaacttccgtacttatctcattataaaacattaacaatttgtgaactggcactagtccatgaaccaaactttgagtacctctgctctagatttcaaaaacagatgtggatatatgtgtaaaaatttggtatataaaaaagatgcttttctagatgggtagaagaaaagattgttcaaatgtcctatggtctcacaatccagtggttataactgtaaaactcatccagcctttgggagacactgaaactccatttaaagataagaacttgaaggatgtttaatgtaaacctaaattgattttcccttcaactccttttgggtacataattacttttacctagaagctgttcttgactttactcataacaattataccatgacctcactgtccttctccaagatgaaacaaaaaacccttcaagtgggcctggccaacaagactgaatctattgagcctattggtcaagttagcctttgctcaactttccccaaccccttcactccagccttagctgggatgcttttatataatcctcagagcatggaagagagacaaacagagcctcctcctgcaattggcccaagatttcaggggagcaaaaggcaaaagaccgaaatcaatgactaggatgatgccatgccatgg

SEQ ID NO: 758 - protein, 83 aa, Homo sapiens
MTSLSFSKMKQKTLQVGLANKTESIEPIGQVSLCSTFPNPFTPALAGMLLYNPQSMEERQTEPPPAIGPRFQGSKRQKTEIND

SEQ ID NO: 759 - DNA, 1376 bp, Homo sapiens
  misc_feature (907)..(1222): wherein any n is one of a or t or g or c
agtgagtgtgacaaatgcttcagtagaagtacaaacctcataaggcatcgaagaactcacacaggtgagaaaccatttaagtgtctcgagtgtgaaaaagcttttagtgggaaatcagatcttattagccaccagagaactcacactggggaaaggccctacaaatgtaataagtgtgagaaaagttaccgacaccgttcagccttcattgtacataaaagagttcatactggggagaagccctataagtgtggtgcctgtgaaaaatgctttggccagaaatcagaccttatcgtgcaccagagagtccgcacaggtgagaagccgtataaatgcctggaatgtatgagaagttttactcggagtgccaacctaattaggcaccaggcaactcacactcacacttttaaatgccttgaatatgaaaaaagctttaactgtagctcagatcttattgtacatcagagaattcacatggaagagaaaccacatcagtggtctgcgtgtgagagtggcttcctcctaggaatggactttgttgcccaacagaaaatgagaactcaaacagaggagctacactataaatacactgtatgtgataaaagcttccaccagagttcagcccttcttcaacatcagacagtacacattggtgaaaaaccgtttgtctgtaatgtgagtgaaaaggtcttgagcttagccctccccatgcgtcagaagcctcacagatgtcttccaggcgagaagctgtaataccaatattaaaaattatttatgatcagagaactcattaagatgaggacaaatctcagactttgctcagagctcagaattcagtggggaccaagagcctgcaattggaaatatgagaaattctttgcccagagagctgccctaacagaacacnttcatcctcactccaacgagaaantctacagatgcccagaggttttgaaaacttaccgtctgagctcaaatttgatcactcacaagaggattcatacaagtgggaaaccttagaaatgcactgagtgtgagagagctttctactaatgctcagcccttctcgttngtaagagaattcacaccggagaacaactttttaaatgccttcagtgtcagttgtgctgcagacagtatgaacatctcattggacctcagaaaacccaccctggggagaagccccagcaanngtgtgaaaaaagcttctaacaaaactctngacttacccatcagagaagccatactggtgaaaaattgtatatttgtcttaagtatggcaaaagcattcgttggagagccttacttgggtttgcacccaaaaaaaaaaaacccaatctgaggaaagactgcaggtgtctgaatgaaaagtgctg

SEQ ID NO: 760 - protein, 250 aa, Homo sapiens
SECDKCFSRSTNLIRHRRTHTGEKPFKCLECEKAFSGKSDLISHQRTHTGERPYKCNKCEKSYRHRSAFIVHKRVHTGEKPYKCGACEKCFGQKSDLIVHQRVRTGEKPYKCLECMRSFTRSANLIRHQATHTHTFKCLEYEKSFNCSSDLIVHQRIHMEEKPHQWSACESGFLLGMDFVAQQKMRTQTEELHYKYTVCDKSFHQSSALLQHQTVHIGEKPFVCNVSEKVLSLALPMRQKPHRCLPGEKL

SEQ ID NO: 761 - DNA, 1492 bp, Homo sapiens
  misc_feature (1): wherein any n is one of a or t or g or c
ncctaggggcagctttgtaagcagcttcgcaagccctgaaacttctggctggtagggatgccagctaaaccagatggcatcaaacagtgaaatacaggcctggctttcagacttgatgatacaccccctgaagactccattcctttggtctttccagaattagaccagcagctacagcccctgccgccttgtcatgactccgaggaatccatggaggtgttcaaacagcactgccaaatagcagaagaataccatgaggtcaaaaaggaaatcaccctgcttgagcaaaggaagaaggagctcattgccaagttagatcaggcagaaaaggagaaggtggatgctgctgagctggttcgggaattcgaggctctgacggaggagaatcggacgttgaggttggcccagtctcaatgtgtggaacaactggagaaacttcgaatacagtatcagaagaggcagggctcgtcctaactttaaatttttcagtgtgagcatacgaggctgatgactgccctgtgctggccaaaagatttttattttaaatgaatagtgagtcagatctattgcttctctgtattacccacatgacaactgtctataatgagtttactgcttgccagcttctagcttgagagaagggatattttaaatgagatcattaacgtgaaactattactagtatatgtttttggagatcagaattcttttccaaagatatatgtttttttcttttttaggaagatatgatcatgctgtacaacagggtagaaaatgataaaaatagactattgactgacccagctaagaatcgtgggctgagcagagttaaaccatgggacaaacccataacatgttcaccgtagtttcacgtatgtgtatttttaaatttcatgcctttaatatttcaaatatgctcaaatttaaactgtcagaaacttctctgcatgtatttatatttgccagagtataaacttttatactctgatttttatccttcaatgattgattatactaagaataaatggtcacatatcctaaaagcttcttcatgaaattattagcagaaaccatgtttgtaaccaaagcacatttgccaatgctaactggctgttgtaataataaacagataaggctgcatttgcttcatgccatgtgacctcacagtaaacatctctgcctttgcctgtgtgtgttctgggggaggggggacatggaaaaatattgtttggacattacttgggtgagtgcccatgaaaacatcagtgaacttgtaactattgttttgttttggatttaaggagatgttttagatcagtaacagctaataggaatatgcgagtaaattcagaattgaaacaatttctccttgttctacctatcaccacattttctcaaattgaactctttgttatatgtccatttctattcatgtaacttctttttcattaaacatggatcaaaactgaaaaaaaaaaaaaaaaaaaaaaaa

SEQ ID NO: 762 - protein, 127 aa, Homo sapiens
NTGLAFRLDDTPPEDSIPLVFPELDQQLQPLPPCHDSEESMEVFKQHCQIAEEYHEVKKEITLLEQRKKELIAKLDQAEKEKVDAAELVREFEALTEENRTLRLAQSQCVEQLEKLRIQYQKRQGSS

SEQ ID NO: 763 - DNA, 286 bp, Homo sapiens
tccggagactagcaagaccctctgaaagacaccgcgtccccagggataatcccccgtgtccggcaaagctgccccgctcgagcgcgaaccctgggacccagcgcgggaggcagaccagcagctggccgctgggctgtgaacgccaggaccgagcggaagcttcccgcccggccgcgatcggtgccgcggctctcagggaagtggctacgcgcgtccctcgggaaagcagtaacaatgttggcatggctgtttttgtttctgctcagccccatcctggtcctcacca

SEQ ID NO: 764 - protein, 87 aa, Homo sapiens
MGLSRNKNSHANIVTAFPRDARSHFPESRGTDRGRAGSFRSVLAFTAQRPAAGLPPALGPRVRARAGQLCRTRGIIPGDAVSFRGSC

SEQ ID NO: 765 - DNA, 648 bp, Homo sapiens
  misc_feature (169): wherein any n is one of a or t or g or c
gcaaagatgccgtcagctagtactgaaagccgaagagactggggcaggggaatggcttgtgttggtcgtacgagagaatgtactattgtcccttctaatcattatggacccattcctggtattcctgttggatcaacttggagatttagagttcaggtgagcgaagagngtgttcacagaccccatgttggtggaattcatggtcgaagtaatgatggggcttattctcttgtactggctggtggatttgcggatgaagtcgaccgaggtgatgagttcacatacactggaagcggtggtaaaaatcttgctggtaacaaaagaattggtgcaccttcagctgatcaaacattaacaaacatgaacagggcattggccctaaactgtgatgctccattggatgataaaattggagcagagtctcggaattggagagctggtaagccagtcagagtgatacgcagttttaaagggaggaagatcagcaaatatgctcctgaagaaggcaacagatatgatggcatttataaggtggtgaaatactggccagagatttcatcaagccatggattcttggtttggcgctatcttttatgaagagatgatgttgaacctgctccttggacctctgaaggaatagaacggtca

SEQ ID NO: 766 - protein, 198 aa, Homo sapiens
  VARIANT (57): wherein Xaa may be any one of Arg or Cys or Gly or Ser
AKMPSASTESRRDWGRGMACVGRTRECTIVPSNHYGPIPGIPVGSTWRFRVQVSEEXVHRPHVGGIHGRSNDGAYSLVLAGGFADEVDRGDEFTYTGSGGKNLAGNKRIGAPSADQTLTNMNRALALNCDAPLDDKIGAESRNWRAGKPVRVIRSFKGRKISKYAPEEGNRYDGIYKVVKYWPEISSSHGFLVWRYLL

SEQ ID NO: 767 - DNA, 720 bp, Homo sapiens
  misc_feature (1)..(43): wherein any n is one of a or t or g or c
nnttgacaacaggagtgtgaacagtgacagggcttcacagggngagagagagcaccccgactgaaccacccgcctgagcagatagactctcactcaagactacctcatagcgcacacccctcgggaaaaccaccatccgctccagcctcggcacctcagaatgtatttagtacgactgtaagcagtggttataacaccaaaaaaataggcaagaggcttaatatccagcttaagaaaggtacagaaggtttgggattcagcatcacttccagagatgtaacaataggtggctcagctccaatctatgtgaaaaacattctcccccggggggcggccattcaggatggccgacttaaggcaggagacagacttatagaggtaaatggagtagatttagtgggcaaatcccaagaggaagttgtttcgctgttgagaagcaccaagatggaaggaactgtgagccttctggtctttcgccaggaagacgccttccacccaagggaactgaaagcagaagatgaggatattgttcttacacctgatggcacgagggaatttctgacatttgaagtcccacttaatgattcaggatctgcaggccttggtgtcagtgtcaaaggtaaccggtcaaaagagaaccacgcagatttgggaatctttgtcaagtccattattaatggaggagcagcatctaaagatggaaggcttcgggtgaatgat

SEQ ID NO: 768 - protein, 231 aa, Homo sapiens
  VARIANT (6): wherein Xaa may be any one of Arg or Gly
QGFTGXERAPRLNHPPEQIDSHSRLPHSAHPSGKPPSAPASAPQNVFSTTVSSGYNTKKIGKRLNIQLKKGTEGLGFSITSRDVTIGGSAPIYVKNILPRGAAIQDGRLKAGDRLIEVNGVDLVGKSQEEVVSLLRSTKMEGTVSLLVFRQEDAFHPRELKAEDEDIVLTPDGTREFLTFEVPLNDSGSAGLGVSVKGNRSKENHADLGIFVKSIINGGAASKDGRLRVND

SEQ ID NO: 769 - DNA, 625 bp, Homo sapiens
  misc_feature (75): wherein any n is one of a or t or g or c
agatcttggagatcatagttcgctgggttcacatcatggaaatcgtctttgacaaaactgaaatgccctgaagtnttaattttttaaatatatgtaatgaattggtatatggtagatactcgtggctacttagtatttaccaaatgctttgtttccatctcgtttatttttattttttatttttttaagagacagtcttgctatgttgcccaggctggacttgaactcctagcctcagccaacccttctgcctcagcctcctgagtagctgggatcataggcatgtgccactgctcctagctcttccatctcagtcttatgatgtagttactattttcattttataaataagaaaatagaagctcaaataaaatgggtagtttccttgaggtcatcctgttagtaagtggtggaatgaagttacaaacctaggttttattggtcagcacacacagtgccgggcactggcagtacagcagtgaacaaaaggtctgttggtttgtctgaagctctcaaccttgattctgcatagactcggtggattgcccaaggccactcaaccagttaatattcagagccagctctgctgtttgacccagtatattattttcaccatgctgtatct

SEQ ID NO: 770 - protein, 55 aa, Homo sapiens
MNWYMVDTRGYLVFTKCFVSISFIFIFYFFKRQSCYVAQAGLELLASANPSASAS

SEQ ID NO: 771 - DNA, 598 bp, Homo sapiens
ttttttttttcaagaactggagccgcttgtgtgtttattagtgccttgaaagaaagctccccaacaatccatcattggggggaccccagctcacccaccagcgcttcccaccccgtgcacatgacccttacagtccacgttcctcttgctccacaggaagtagcagccaccatggttgctcatctaaagaaagcctggcttccctttgatctttcccttcctggccaacatccaggcctggcagtagcatttctcagaaacctggggacaagtttatctgagcaccagatccatgtcagggggggatgttttcacggagatgtgttgcaatgttctttattacatgctttttctctccttgcctttttttaacaagactccagtgggaacaccaaatggcctcagaccccgggtggccgcgcggggctccgagccgcgcaggcctccttggcagacatcttcctgggggcagagggaagtgggccccgcgctgtggaaggccccaggctggagcgccggggacagctgtccaagcggcgagggctaggagtggcctcgcctagcgctgagccggccaggccctggaggtgctccgcgg

SEQ ID NO: 772 - protein, 85 aa, Homo sapiens
MFSRRCVAMFFITCFFSPCLFLTRLQWEHQMASDPGWPRGAPSRAGLLGRHLPGGRGKWAPRCGRPQAGAPGTAVQAARARSGLA

SEQ ID NO: 773 - DNA, 935 bp, Homo sapiens
acacgggcagccaggtggagagaagggcagagctaccttcagcagacaaaacgacccatgcaaaggctctggggcctggaggagctcgaccctagatgagactggcgctggtattgtccccacttcaccaggaaggaagccaaggctgcagaggatgggcagcacctaacgcctcagggctaattgttctccatccgtccactcgttccaagtccattcacttcctgctacccaaggccactgtccccttccggtgggaccagttacctgatgctgggtttaaccttctccaccagaataaccactggccttagaaactcacttgggtttcacgtctgcatgtgtgtgagctagctctggggttgaaattgtatcagcatgatcatcacagttatatctgatacttgatttgtctccaaaagctcaaattgataggttaaataaatgacatatgcttcatcaacataactgagtgctacattatcaaattcacaaagactaggtgagaatacagggaaatgtgtgtgaaaatgatcaatacacaaactagtacacatgatatcctgattttatttttaaaaacataaatatatacagacaaaaattttgaaggaaatacatcaaaccattgaccatcgtgttcaagataacagtatgggaatgttaatggcattacttcataacgttcttctgaattttcatgaatattgaatttataatcagaacacataaatattgaatttataatcagaaaaatacaatgagttttggtttggtttttcttttttttttttttttgccccccactcctccccaccccactgggttttgttgttttttaatagaaggacaataccaaaattacccaatactcagatctccagaatttggtgccactgaaaacccagaattgcctctgatttactgggtatcct

SEQ ID NO: 774 - protein, 84 aa, Homo sapiens
MCSDYKFNIHENSEERYEVMPLTFPYCYLEHDGQWFDVFPSKFLSVYIYVFKNKIRISCVLVCVLIIFTHISLYSHLVFVNLIM

SEQ ID NO: 775 - DNA, 419 bp, Homo sapiens
gtggctgggactacgggtgcacgccaccacactcggctaattttgggattttttttagagataggttctcactatgttgcccaggctgctctcgaactcctgggatcaagtgaccttcctgcctcaaaaaaattttatctttgttctcttatgactgggatagcggaagtttagtttttaattctgaattacagattacagttattgactttgcattgccttgtagctcttggctgctctttgtggggttcagggaccagtagaatcaggagcccctgggagcttattaggaatgcagaatttcaggcccctccccagacctactgagaatctgcattttaagaagatgtgactttctgacgagctcagatctctctccagccttcctaggtcatcttgcatctgatactctctctcag

SEQ ID NO: 776 - protein, 57 aa, Homo sapiens
VAGTTGARHHTRLILGFFLEIGSHYVAQAALELLGSSDLPASKKFYLCSLMTGIAEV

SEQ ID NO: 777 - DNA, 633 bp, Homo sapiens
gccgcagcgacaacgtgccctacgtggtcaccctgcttagcgtgatcaacgccgtcatcttgggccccgaggacctgcgcgcgccacccagctgcggaacgagtttatcgggctgcagctgctggacgtcctggctcgcctgcggtgagtccccactgtagcggtcctgccggctccccctccgctcccaaggccaggcccacctgccctttgctcccagccacctcacctaagcagcacctccagatggcagggaggtggctccctcggagtaaccccaggggtccagccagaagccaggtctcaggctagaatccagctcactgtccctggcagctgcccacagaaactagggttgcagcagccatagaaaggacagaatgagctcatatcctttgcacaccgtggatggagctggaggccgtgatcctaagtgaaccaacccagaaacagaaaatgaaatgccaataagagggaactacagggtggttcacgtggacgcaagatggagacagggacacgggctccagggcgagagttgaaaaactacctacagggtacagtgttcgtcgctacttggtgtcaggcccactagaacaagggtccccaaccgccaggctgcggaccggtacc

SEQ ID NO: 778 - protein, 88 aa, Homo sapiens
STPSSWAPRTCARHPAAERVYRAAAAGRPGSPAVSPHCSGPAGSPSAPKARPTCPLLPATSPKQHLQMAGRWLPRSNPRGPARSQVSG

SEQ ID NO: 779 - DNA, 275 bp, Homo sapiens
  misc_feature (1)..(275): wherein any n is one of a or t or g or c
ncggaatatttggtgacacaagggatatcgctatcacagcagtagactatcccaagcagtgaaccactgcctatcccaagcgaatgaggccatcagctacagatggtcttacaatggaccccaatgagccaattacaacttctacaaggaccctggactgacctgctgggcccttccactagcctaaagagttcccttctggaggagactacaactgcaggaccgcttcttcgcccctatccagcaggaagtagctacagtggtcatcagccaan

SEQ ID NO: 780 - protein, 57 aa, Homo sapiens
MVLQWTPMSQLQLLQGPWTDLLGPSTSLKSSLLEETTTAGPLLRPYPAGSSYSGHQP

SEQ ID NO: 781 - DNA, 407 bp, Homo sapiens
aagcttcacagtggcatttaaggctcctgggttaagttaggaatgggggtgttcctgatgtgggggctttaggcttccatgaagtgggtctgggccccctgccttacctcacagcccccatctaccctggaagagggagttgaaaatgctgggatagcagcaggatcagttctcagcttgagccaaagcacccggccctgggcagctgagcatcagcacagaaccctctgagtcctttgggctctctgctgaggaagactgcttcactcttcccgcccaccaactcgctggcccaaccagcagctgctgcttgagaaaacacccacagactcggcagatgggagtcttagcatttactttccccaccccacattcttggaacagcttgtggtcttctggaaatggct

SEQ ID NO: 782 - protein, 50 aa, Homo sapiens
MKWVWAPCLTSQPPSTLEEGVENAGIAAGSVLSLSQSTRPWAAEHQHRTL

SEQ ID NO: 783 - DNA, 222 bp, Homo sapiens
  misc_feature (1): wherein any n is one of a or t or g or c
ntgatccaggagatggcggggaaagaggatgagaaatctgggtaggcaggttgaccccacccctccacctgatgggaggccctcgctccagcccaagatgtcttctcttctctctgtccctaaactcttgcttggtctttggttctcccagtcctgcatgcagccaccaccaagtggttcctgtgtatggcaggatcaaggaacgacaggaagggccctagg

SEQ ID NO: 784 - protein, 64 aa, Homo sapiens
MRNLGRQVDPTPPPDGRPSLQPKMSSLLSVPKLLLGLWFSQSCMQPPPSGSCVWQDQGTTGRAL

SEQ ID NO: 785 - DNA, 520 bp, Homo sapiens
agatctgttcttagaatgaatgctgtgtggggcggctgggaggagggggtgtgatggagattggagaagctgaacccaccttggccccatcccaacggccccatcttggatccgccactgggcgagggtctggacacctggctggtctccacctcttgtcagcctgctctctctggtcaggattggactccctcggggtttcctcagtgacgccgcgtggtctgggggctcggagaccctcctcctccccaacccgccggcccccggccctcccgccgccgcggcctcccacgtagcgttctgaacccgctcagcgctaaggcaagaaccagcgtggggagcgggccaggcgagcagaggctctaaatcttccttcactctgtgagtagatgaagtctgagaaacaaattcaaagcaggcgcgcctgcagagccttcctgcggaaacattccccggcattcaagcgcatccaggggcggcttgagctgccttgtttggctaaggtcagacgagactcgag

SEQ ID NO: 786 - protein, 153 aa, Homo sapiens
MPGNVSAGRLCRRACFEFVSQTSSTHRVKEDLEPLLAWPAPHAGSCLSAERVQNATWEAAAAGGPGAGGLGRRRVSEPPDHAASLRKPRGSPILTRESRLTRGGDQPGVQTLAQWRIQDGAVGMGPRWVQLLQSPSHPLLPAAPHSIHSKNRS

SEQ ID NO: 787 - DNA, 366 bp, Homo sapiens
tgatcaaggaaaatgagaactgagaaaagatcattgaatttggcaacgaggagtcactgatgacctttatgagcacagagtagggtaattatcagatcacagaagatggagtgcatgggttatgtgtcactggagggagcaatgtaattttggtgtaaaagaaattaaaagcttgagaagcagagggataaaatgaatcttttaaaaattggtcaaaagcttcatattttgagggctaacaaagaaaaaacagtagcgctcccatgggacatccaacattggaaactctgggttcttggacctttgaattccagaactttctccaattgccccccaccccctctcacccattatcccgggtcggat

SEQ ID NO: 788 - protein, 58 aa, Homo sapiens
MNLLKIGQKLHILRANKEKTVALPWDIQHWKLWVLGPLNSRTFSNCPPPPLTHYPGSD

SEQ ID NO: 789 - DNA, 464 bp, Homo sapiens
  misc_feature (1): wherein any n is one of a or t or g or c
ntcaaagaagccaagaacttgacggctgccaaagcaggagggacttcagacagctttgtcaagggatacctccttcccatgaggaacaaggccagtaaacgtaaaactcctgtgatgaagaagaccctgaatcctcactacaaccatacatttgtctacaatggtgtgaggctggaagatctacaggatatgtgcgtggaactgactgtgtgggaccgggagcccctggccagcaatgacttcctgggaggggtcaggctgggtgttggcactgggatcagtaatggggaagtggtggactggatggactcgactggggaagaagtgagcctgtggcagaagatgcgacagtacccagggtcttgggcagaagggactctgcagctccgttcctcaatggccaagcagaagctgggtttatgagtccctgtcctcttctgcatgtccagccctggcgagggcag

SEQ ID NO: 790 - protein, 140 aa, Homo sapiens
  VARIANT (1): wherein Xaa may be any one of Ile or Leu or Phe or Val
XKEAKNLTAAKAGGTSDSFVKGYLLPMRNKASKRKTPVMKKTLNPHYNHTFVYNGVRLEDLQDMCVELTVWDREPLASNDFLGGVRLGVGTGISNGEVVDWMDSTGEEVSLWQKMRQYPGSWAEGTLQLRSSMAKQKLGL

SEQ ID NO: 791 - DNA, 788 bp, Homo sapiens
ttttttttttttataataaaatattctttatgctcagaattttaaaaatagatgtagactggaaaacctgcaatttcctcattaccatctaatacatagaaagtcaaatcacttacggacagaaacagacttgaaaatttcagctgagaaaacattttagaataaaagaaacattttattcagcacagtcaaaacaaaacaaaaacaacaaaacaatgtttaaaatggactttctgttagaggtggccgtttcacagtcaaaattatcccagagaattgtttatattaaaaacaggctgagaatagtttgacctctgatcaccaaaaaacctggaggataaacattcatctgtcaagatttctctggaaaatccctgcgctgcttcaaagagacagaacaaaggtaaatagcatctgccacccaaatcttgctgaatagagtgatttatcttcaggcctactagccggcgacaggagcgcacctcctcccttctcctagctgtcccgggtttattcattccctgagcctgaatcctgataagggagcagagtagggtttaagacctcggaccccagaatacaccactgcaattgaattttggttccaccttaaggtaaactacgcagctgctgtgagcctcagtttccctacctatagaaagaggatcgtagtggggaattgttgcaggggttaaatgagattgtacggatcgtggagcagcgcctggcgtgtggtaacgctcaacttatgcgggttgtaactgcctgaggcgtttccttcggcgcgc

SEQ ID NO: 792 - protein, 84 aa, Homo sapiens [sequence omitted]

SEQ ID NO: 793 - DNA, 330 bp, Homo sapiens
gctagctaggcacagaacgcataggaaagatgaggtcaaggcaagtttcttagaagccatgaaggctgagctgaatttggggactccagaaaacagaagacgtaaaattgcaaaaggtccttgttctcaaaatgttgtcttaaaagctctgagcttcctgaaagatttcaggcaagccaggggagggagggcaggcatggctaactttgcatttaggacagatccccttggcagccatgttgggcatagatgggaagataggaaggccaggggaatggtcataccccagcgaagaagtgatgagtgcctgggttcaagcaggatccatgt

SEQ ID NO: 794 - protein, 90 aa, Homo sapiens
MKAELNLGTPENRRRKIAKGPCSQNVVLKALSFLKDFRQARGGRAGMANFAFRTDPLGSHVGHRWEDRKARGMVIPQRRSDECLGSSRIH

SEQ ID NO: 795 - DNA, 614 bp, Homo sapiens
ttttttttttttttttttttttgttcggggcattttattttctaaaatgtggcaaaaagaaaataactccagcaggtgacagaagacctagtagaacttagcccaaatttaaataatgacccaaagtccccacggggctcagacgttcccacaccctacgcagaaatccccactcacacgagcacgcatacacacgcgtgcacacatacccctgccatcatctctgctctctccattgagccctggctaagcaccagctcccaccaggcaggaagcacaggcccaggacacgcacactagggcttggcgggtggggtccaagtcaggaagtgagagccgaggccctacaggaacagggggttgccccttcaacaggtaacccatataaaaagtgactaacgaaagcacgtctttcttctcactccacagctttgaaaccagtgtgcattgtacacgtggagccatctcagacccagactcaaagtccgcctggctccggccatcagcctgtggcgtctcagagcctggccccgagcagagaggagatgtgatgaggagacatgacgagggagtcgtgatgggcacacccatggccagcaggcccagcctgtgcc

SEQ ID NO: 796 - protein, 114 aa, Homo sapiens
MGVPITTPSSCLLITSPLCSGPGSETPQADGRSQADFESGSEMAPRVQCTLVSKLWSEKKDVLSLVTFYMGYLLKGQPPVPVGPRLSLPDLDPTRQALVCVSWACASCLVGAGA

SEQ ID NO: 797 - DNA, 1028 bp, Homo sapiens
ttttttttttgaatgtctgagataaggtgtgtcaagttggggaaaaaactttacacacatacaagtgcacaaacacacatatacaaaaatttagtaagtaggctagtaggctagtgaatgttttagagagcatcctattgctgaaagagaaacacacagtaagccatagaagaaacacacaattcagattttataaatatatacacacactaagatcttaaagctgggaatttaaacattattagcatttatgagaaatattacagctcactgactattcatatctagcataggattaggtttatacatgtatatgctctcacgggcctaaatataacagtgttttttcttagcaatttaagatttaggcttttcttcaaaattctttgttcattttgtacttgctttgctatggctggacccagattttacgtaggtttaaagggcctcaaagaaattaaaatgataaagtaatcaatgtgatactaattacaacacattcacaggaggtggtattacaagaaagcaaagtgtaaattgggggaaaaaaaagtccagatataaaagtaaaaatactatcttccaaactttcattttcacacttattaaaataatttgcatgcaaacagaaaattatctgtttgtttaataaatgataactatgtttatctaacataccctgatgactaactctttaaatcttaataactgaaataaacattacagcaaaatgctgttcactaatattttcacagtatttcactacatataaaaatatgctttgaaatgtcttcagccttattattctaattatctaatyctagaaaatcttgacatttgggaaataaatgtggcatttttatttttcaaaataaattataaataaagctccagatagscaaaatcacacaaatgtcaattcttctacatttcaagaggtcagctcttcatagaagaatgtcaacaaaaaatttcaaactaaaatgatacatgtgatccatatttgggtatatccaggaatttaagta

SEQ ID NO: 798 - protein, 72 aa, Homo sapiens
MLDKHSYHLLNKQIIFCLHANYFNKCENESLEDSIFTFISGLFFPPIYTLLSCNTTSCECVVISITLITLSF

SEQ ID NO: 799 - DNA, 487 bp, Homo sapiens
  misc_feature (1): wherein any n is one of a or t or g or c
ncaagtcctccacagatgtcgacatctcctccagctcagattccaccactgcccttgcagtctatgcagtctttacaagtgcagcctgaaattctgtcccagggccaggttttggtgcagaatgctttggtgtcagaagaggaacttccagctgcagaagctttggtccagttgccatttcagactcttcctcctccacagactgttgcggtaaacctacaagtgcaaccaccagcacctgttgatccaccagtggtttatcaggtagaagatgtgtgtgaagaagaaatgccagaagagtcagatgaatgtgtccggatggatagaaccccaccaccacccactttgtctccagcagctataacagtggggagaggagaagatttgacttctgaacatcctttgttagcttcatattctccaattcagcctcattctctaataaaacatcagcagattcctcttcattcaccaccttccaaagttt

SEQ ID NO: 800 - protein, 162 aa, Homo sapiens
  VARIANT (1): wherein Xaa may be any one of Ala or Pro or Ser or Thr
XSPPQMSTSPPAQIPPLPLQSMQSLQVQPEILSQGQVLVQNALVSEEELPAAEALVQLPFQTLPPPQTVAVNLQVQPPAPVDPPVVYQVEDVCEEEMPEESDECVRMDRTPPPPTLSPAAITVGRGEDLTSEHPLLASYSPIQPHSLIKHQQIPLHSPPSKV

SEQ ID NO: 801 - DNA, 435 bp, Homo sapiens
gtcgaatatccaggcagagtacacactgaaaaaacaaaaatcacccacgggttctgaagctcagtggagttctgcagactctgctaacaccagatagtggaaagaaaccatgtgctgaaatgtttgacgacactgatggtttggattgtaggctctgggggactcaccctgtgcagaatgctgccctcacaccctgccgtcaccgtgggacacccactgcggtttgacactctcactgggtgtgggaagtgccctcggtagccccaggagggaccgtcttcggccagcagccacctatgcaggtctctcgtttccggcttgtttacgtgcttggatggaaccagaagagaagaggtcatcagaagaagctgctctgtttgatttggtggagggcccacctgtccaaggcccccaaggtccactcctgctagatct

SEQ ID NO: 802 - protein, 91 aa, Homo sapiens
MTSSLLVPSKHVNKPETRDLHRWLLAEDGPSWGYRGHFPHPVRVSNRSGCPTVTAGCEGSILHRVSPPEPTIQTISVVKHFSTWFLSTIWC

SEQ ID NO: 803 - DNA, 460 bp, Homo sapiens
ggtaccttcaacgcaaaaagttttagaaccccaacaataagaagcatcacacctttatctggaactccaggtacactaataacaatccaaggcagaatcttcactgatgtctatggaagtaatattgtactaagctcaaatgggaaaaatgttaggattttgagagtttacattggaggaatgccctgtgagcttctcataccacaatctgataatttatatggtctaaaactggatcatccaaatggagatatgggttctatggtttgtaagacgactggaacttttattggtcatcacaatgtcagcttcatcttagataatgattatggaaggagttttccacagaaaatggcatattttgtttcttctctcaataaaattgcaatgtttcaaacatatgcagaggtcaccatgattttcccttcacaaggaaagcattcgagtggcaccacgctga

SEQ ID NO: 804 - protein, 93 aa, Homo sapiens
MPCELLIPQSDNLYGLKLDHPNGDMGSMVCKTTGTFIGHHNVSFILDNDYGRSFPQKMAYFVSSLNKIAMFQTYAEVTMIFPSQGKHSSGTTL

SEQ ID NO: 805 - DNA, 300 bp, Homo sapiens
gtcgacgctttcctccccgttcagaagtgacgagactgtatggatcggtttgtgatttaaggacgaacaaacttcccggttcccctgggctaagcaaatctatgtttgatcttacaaactcatctcagcgattcatccagagacatgattcattgtccagtgtacccagtagttcttcttcaaggaaaaattctcaggggagtaacagaagcctggatacaattactctatcaggagatgaaagggactttgggagactgaatgtgaaattgttttataattcttcagtagaacagatct

SEQ ID NO: 806 - protein, 66 aa, Homo sapiens
MFDLTNSSQRFIQRHDSLSSVPSSSSSRKNSQGSNRSLDTITLSGDERDFGRLNVKLFYNSSVEQI

SEQ ID NO: 807 - DNA, 629 bp, Homo sapiens
aggagaggcaaggggccctataaattatttatttttttgcttctcaaactctggaccgaggaccaggattacaggcattacctggaagcttgttacaaatgcagggcctcaggcacccccgtctccgtgtcagcagctgtgtcttagcaggatccccagggcattgcctcacagtcagggtggtgcaaaagtcccgcctggcgtcctggtgagtggaccaggagggggcaggtgaaggcaatattattggtccttcgactccagacaagaacttgcagcttaccctgaggaaagaaattagcccatatgatgaaacacaatctgatgacgtaaggatttttgtacttatgcccacatgtttagacatggcagcccgcatcctcttaaacctgaactttaacataccgtgacttagagccacaaacaacaaaacagagggcaggaaccagagttctccagagaaacagccagtgagaaacaggacccacatccatacggatacaaacatacagatacaggctgggagagggaaggagagaggggcattggctcacactcttacagaagctgagaagccccacgatctgtgggagctgttggcctcccgtctggaggccagtaggctcgag

SEQ ID NO: 808 - protein, 154 aa, Homo sapiens [sequence omitted]

SEQ ID NO: 809 - DNA, 629 bp, Homo sapiens
actagtatcattgctattttattgctattattaagttactattaattactatgactttcattattactattaagttattcatagctctattaattaaattttattagaaatctaacgttttaagtataggtataatattacaacatctttgtgaaacaagattttaaggttaagtgatcactactttttgtgtgtatgaaagaaagcaccttctaaatttccctgaaaggtttctgatccagctgggggaggctctgctggccatgggaagggcacaggatttgacagcagaagacctggttgagtcttgcttctgcagtttgttgatctgcacgaccctggcaacttggtgaacctttcagggccttggtttcatcagccagagaagcttaagtaaaatggggactgtattgtccaattgagaagtccagcaaatgaccagaggtgtagctttaaccaggtctcagatgacgcgatcagaacctgcatctctccctctattagctctgtctccttttgggcaggcttactcataaggcctgcgccagaggtcccaggcagctctaggatcaagttcagctgctggctgatagaagcttggtggctcccaggatctccttggtgggccc

SEQ ID NO: 810 - protein, 52 aa, Homo sapiens
MSKPAQKETELIEGEMQVLIASSETWLKLHLWSFAGLLNWTIQSPFYLSFSG

SEQ ID NO: 811 - DNA, 453 bp, Homo sapiens
  misc_feature (444): wherein any n is one of a or t or g or c
atcgagaacacaagcagcgtgcagatcatcgaggagcatccacccatgattcagaataatgcaagcggggccactgtcgccactgccaccacgtctactgccacctccaaaaacagcggctccaacagcgagggcgactatcagctggtgcagcatgaggtgctgtgctccatgaccaacacctacgaggtcttagagttcttgggccgagggacgtttgggcaagtggtcaagtgctggaaacggggcaccaatgagatcgtagccatcaagatcctgaagaaccacccatcctatgcccgacaaggtcagattgaagtgagcatcctggcccggttgagcacggagagtgccgatgactataacttcgtccgggcctacgaatgcttccagcacaagaaacacacgtgcttggtcttcgagatgttggagcagaacctctantgacttctg

SEQ ID NO: 812 - protein, 148 aa, Homo sapiens
  VARIANT (148): wherein Xaa may be any one of Tyr
IENTSSVQIIEEHPPMIQNNASGATVATATTSTATSKNSGSNSEGDYQLVQHEVLCSMTNTYEVLEFLGRGTFGQVVKCWKRGTNEIVAIKILKNHPSYARQGQIEVSILARLSTESADDYNFVRAYECFQHKKHTCLVFEMLEQNLX

SEQ ID NO: 813 - DNA, 407 bp, Homo sapiens
  misc_feature (356): wherein any n is one of a or t or g or c
tcatgatcccgattcttttcctcactcgctatatatctcagactagcctcttctctagggatcaatttacctatcagtgcaatgggagcatcaacaggagacagggaagactctccgatctcggaggttccttccagtcagagcacctcaggaatcaggcctccgctgaagctgatgggcagcgctgcgaaatcgggcagaggggcctccccggggcacccggactcagctgctcaccccggccccacctcaagagaccgcgcccaagagtccgggtcggcctgagggcctcagccccggccctctcggcagggttcatgacacgcgcgtaggccagaagggccattaacaccacnaggggccgatgggccccggaagggaccccaatccctaccaagctgcacacc

SEQ ID NO: 814 - protein, 67 aa, Homo sapiens
MGASTGDREDSPISEVPSSQSTSGIRPPLKLMGSAAKSGRGASPGHPDSAAHPGPTSRDRAQESGSA

SEQ ID NO: 815 - DNA, 416 bp, Homo sapiens
  misc_feature (142)..(411): wherein any n is one of a or t or g or c
aatgacagtcatgaatgtagcaatggtcatggccccgaatctctttatgtgtcatgcattgggattgaagtccagtgaacagcgagaatttgtaatggcagctgggacagcaaataccatgcacttattgattaagtaccanaaacttctgtggacaattcccaagtttattgtaaaccaagtgaggaagcaaaacacggaaaatcataaaaaggataaaagagccatgaagaaattgctgaagaaaatggcttatgaccgagaaaaatatgaaaagcaagataagagtacaaatgatgctgacgttcctcagggagtgattcgagtgcaagctccccatctttcggaaagtttccatgggcaatacagcttaacttgaaggaactaaaagccagtgatgttactttgccngggtt

SEQ ID NO: 816 - protein, 125 aa, Homo sapiens
  VARIANT (47): wherein Xaa may be any one of His or Gln
MTVMNVAMVMAPNLFMCHALGLKSSEQREFVMAAGTANTMHLLIKYXKLLWTIPKFIVNQVRKQNTENHKKDKRAMKKLLKKMAYDREKYEKQDKSTNDADVPQGVIRVQAPHLSESFHGQYSLT

SEQ ID NO: 817 - DNA, 300 bp, Homo sapiens
  misc_feature (284): wherein any n is one of a or t or g or c
tgtacagaagagagttgtccagtgatgtcagctggcccaaaatatgagtatcattgggcagatggaacgaacataaagaaacctattaagtgctctgcaccaaagtatattgattacttgatgacttgggttcaggaccagttggatgatgagacgttatttccatcaaaaattggaattcaaccttattgatagaagagaacttgcaccactccaagaactgattgaaaaactcacctcaaaagacagataaaaggatgcagagctgtgcaaattgttcctcnaatgaagcagtgtgga

SEQ ID NO: 818 - protein, 63 aa, Homo sapiens
CTEESCPVMSAGPKYEYHWADGTNIKKPIKCSAPKYIDYLMTWVQDQLDDETLFPSKIGIQPY

SEQ ID NO: 819 - DNA, 977 bp, Homo sapiens
gttccattcgcctttcctcttctttcctggcccacgccgctccgaggcctcgcgaccgccgagcctgcagcctgccccgcggccaacatgagcttcttgtttggtagtcgctcatctaaaacttttaaaccaaagaagaacattccagagggttctcaccagtatgagctcttaaaacacgcagaagccacacttggcagtggcaaccttcggatggctgtcatgcttcctgaaggggaagatctcaatgaatgggttgcagttaacactgtggatttcttcaatcagatcaacatgctttatggaactatcacagacttctgtacagaagagagttgtccagtgatgtcagctggcccaaaatatgagtatcattgggcagatggaacgaacataaagaaacctattaagtgctctgcaccaaagtatattgattacttgatgacttgggttcaggaccagttggatgatgagacgttatttccatcaaaaattggtgtcccgttcccaaagaatttcatgtctgtggcaaaaactatactcaaacgcctctttagggtttatgctcacatttatcatcagcattttgaccctgtgatccagcttcaggaggaagcacatctaaatacatctttcaagcactttattttttttgtccaggaattcaaccttattgatagaagagaacttgcaccactccaagaactgattgaaaaactcacctcaaaagacagataaaaggatgcagagctgtgcaaattgttcctcaaatgaagcagtgtggagtgtattggggattttgttatattttgtttttatctggattgtttttgtcctaggtttgggggcgggggcttgtttgggttcctttttctttattctgattatgtgaaaccatattctattgctaggggaagccaagaaccattctctatacacttgataagggtaaatttatcttagtgtttttaaacttg

SEQ ID NO: 820 - protein, 245 aa, Homo sapiens
VPFAFPLLSWPTPLRGLATAEPAACPAANMSFLFGSRSSKTFKPKKNIPEGSHQYELLKHAEATLGSGNLRMAVMLPEGEDLNEWVAVNTVDFFNQINMLYGTITDFCTEESCPVMSAGPKYEYHWADGTNIKKPIKCSAPKYIDYLMTWVQDQLDDETLFPSKIGVPFPKNFMSVAKTILKRLFRVYAHIYHQHFDPVIQLQEEAHLNTSFKHFIFFVQEFNLIDRRELAPLQELIEKLTSKDR

SEQ ID NO: 821 - DNA, 647 bp, Homo sapiens
gctggggccgcgtgtggcacctcaggggggcggcccccggcctcaagaggagggggaggagaaggaggaagaggaggaagtgagcccgaaggatccgctcggagctgtttgtccagctgtttctattcgcacccggagcagtacagccagaagggggccgagccgaaggtggctggctttaggcgctaatttccaactcttttcctcacagcttgtcttttccaggcaccctggagtcccctcaggccagctcggtgggcgcgcacctgccagccgcccctgacctcgcaggccaggcgacctccgagcctgagaagatggcccagtccaagctcgattgccgctcacctgtcggcctcgactgctgcaactgctgcctggacctggcccatcggagtgggctccagcgaggcagcagcggggagaacaacaacccgggcagccctacagtgagcaactttcggcagctgcaggaaaagctggtctttgagaacctcaataccgacaagctcaacagcataatgcggcaggattcgctagagccggtgctgcgggacccctgctacctgatcaacgagggcatctgcaaccgcaacatcgaccagaccatgctctccatcctgctcttcttccacagtgcctccgga

SEQ ID NO: 822 - protein, 110 aa, Homo sapiens
MAQSKLDCRSPVGLDCCNCCLDLAHRSGLQRGSSGENNNPGSPTVSNFRQLQEKLVFENLNTDKLNSIMRQDSLEPVLRDPCYLINEGICNRNIDQTMLSILLFFHSASG

SEQ ID NO: 823 - DNA, 372 bp, Homo sapiens
tccggaacatcaagatccaggcgcagaagaccgtcagaagctgcactggccacctccttcaggtggactctcgttggtggccggcgtcgctggccccctcgcacccggtcccgtgtcacatgctccagggcgcagctcttgtccacctttacctcatcgaaagccttgtttttgcctcggttaatcccttcattgagggctttgatccaggattccttctcctccccggtgggtgcctggaatttgatgtcgctgaccttgttccctggggatcgcagcaggataaagcggtgttttcgcttgaggagggcacgaaggtcctggcacttctcatagctgcccagctccacagtctccacacacttctgatca

SEQ ID NO: 824 - protein, 84 aa, Homo sapiens
MLQGAALVHLYLIESLVFASVNPFIEGFDPGFLLLPGGCLEFDVADLVPWGSQQDKAVFSLEEGTKVLALLIAAQLHSLHTLLI

SEQ ID NO: 825 - DNA, 292 bp, Homo sapiens
agatctatgcatgcccacaccctatccaaatttcaaaaagcctggtcttcagtgttgtttaatagtgcctcaggtgatactgatacacatcaaactttgagaatcactgacttaaccttttgggatgttaatctccctaaaaagaaatatcccatttgtgtgagctttgaaggaacaaaaggatatgggcattagacataggaaattactgaagaccattattgccaaccacaggtatgtggaggtaacttgcagttctcaccaacaacagtatatccagtaggtagaattc

SEQ ID NO: 826 - protein, 62 aa, Homo sapiens
MHAHTLSKFQKAWSSVLFNSASGDTDTHQTLRITDLTFWDVNLPKKKYPICVSFEGTKGYGH

SEQ ID NO: 827 - DNA, 369 bp, Homo sapiens
atcaccaagcagaatgtccagcgggtcctggaggctgctaacctcttccagttcctgcggatggtggatgcctgtgccagcttcctcactgaagccttgaacccagaaaactgcgttggaatactgaggctggctgacacacactcgctggacagtctaaagaagcaggttcagagttacatcattcaaaactttgtgcagattctgaactctgaggagtttcttgacctgcccgtggacactctgcaccacatcttgaagagtgatgacctttacgtgaccgaggaggctcaggtgtttgagaccgtgatgagctgggtccggcacaagccatcagaacgactctgcttactcccctatgtcctcgag

SEQ ID NO: 828 - protein, 123 aa, Homo sapiens
ITKQNVQRVLEAANLFQFLRMVDACASFLTEALNPENCVGILRLADTHSLDSLKKQVQSYIIQNFVQILNSEEFLDLPVDTLHHILKSDDLYVTEEAQVFETVMSWVRHKPSERLCLLPYVLE

SEQ ID NO: 829 - DNA, 341 bp, Homo sapiens
  misc_feature (341): wherein any n is one of a or t or g or c
ctcgaggagaaggggcggcggttgcacgtcaggggcttttggggaatcttattcaacaaatggcaaaatggagcccaagtggtttgcccaaggatgtccagcagttggcaaggtggcaactagaacccgcgtcttctaatcccggtccagggatctttcttcgcctgtcacagagacaaggggccagtgcagcgctagtgcggagagacaaggctccaggcacggaaaagcagatgccgggccggggttccagcgccgcagtcacggcggtggacggcaagctgtgcggacgactgggggcgccatgaatggtcgaggatccggggagccgagtccagatn

SEQ ID NO: 830 - protein, 82 aa, Homo sapiens
MAKWSPSGLPKDVQQLARWQLEPASSNPGPGIFLRLSQRQGASAALVRRDKAPGTEKQMPGRGSSAAVTAVDGKLCGRLGAP

SEQ ID NO: 831 - DNA, 412 bp, Homo sapiens
tgtacatggagcaaagaagttcgtcatcctgatattggtggcaagatcataatgtgtcctcagtgtgataggctttgtccattctggaaactcaatattacttgcgagtcctcaaagaaattgtgcatcttcgacagttttggaaccctggtctttgcagtatttatgggagtatgggttaccttgtttttggagttttggaagcgacgccaggcagaacttgagaatgaatgggatactgttgagttacagcaggaggaacaagcccgaccagaatacgaagcacgatgtactcacgtagtgataaatgagattactcaggaagaagaacgcattccctttactgcctggggaaaatgtatacggataaccctctgtgccagtgctgtctttttctggatcctattgatca

SEQ ID NO: 832 - protein, 137 aa, Homo sapiens
CTWSKEVRHPDIGGKIIMCPQCDRLCPFWKLNITCESSKKLCIFDSFGTLVFAVFMGVWVTLFLEFWKRRQAELENEWDTVELQQEEQARPEYEARCTHVVINEITQEEERIPFTAWGKCIRITLCASAVFFWILLI

SEQ ID NO: 833 - DNA, 489 bp, Homo sapiens
cgggcactgtttgtcagcggcctccctgtggacattaaacccagagaactctacttgctcttccggccgttcaaggggtatgaagggtccctgatcaagctcactgcaagacagcctgttggttttgtgatctttgacagccgtgcaggagcagaagcggccaagaatgcgctgaacggtattcgctttgatcccgaaaatccacagactctgaggctagagtttgccaaagccaacaccaagatggccaagagcaagctaatggcaactccaaatcccagcaacgtgcaccccgccctaggagcacacttcatcgcacgggacccctatgacctgatgggggctgctctgatccctgcatccccagaggcctgggccccctaccctttgtacaccacagagctgaccccagccatctcccatgctgcgttcacctacccaactgccactgccgctgccgccgccctccacgctcaggtgcgctggtac

SEQ ID NO: 834 - protein, 163 aa, Homo sapiens
RALFVSGLPVDIKPRELYLLFRPFKGYEGSLIKLTARQPVGFVIFDSRAGAEAAKNALNGIRFDPENPQTLRLEFAKANTKMAKSKLMATPNPSNVHPALGAHFIARDPYDLMGAALIPASPEAWAPYPLYTTELTPAISHAAFTYPTATAAAAALHAQVRWY

SEQ ID NO: 835 - DNA, 430 bp, Homo sapiens
  misc_feature (1)..(363): wherein any n is one of a or t or g or c
ngccactccgtgaggactccttgctncctctgagcagtggaagggtntaatcactccttgtgtagcaggcactccagcctgctacctgacagccatctaactccctcctctctgctggtagaacaagttcactctttcctcatgtgatgaaggaggagagcttgctgatgctctgaggatagcagagtaggtggaaagagcttgatggtgttgagctgctgaattaccaaactggaagcagactacatgtggacttctttttatatgagatgccaccgtaagtcatcaacggagcatgtnttccttctggtactgattgctcagaagctcagagtatcagtgggtcttcacatctcangtcanaagtcaccaccctctggaaagctgtgtgaacatccttgactgcctcagcaacaactgctctgcagta

SEQ ID NO: 836 - protein, 51 aa, Homo sapiens
  VARIANT (38): wherein Xaa may be any one of Arg or Cys or Gly or Ser
  VARIANT (39): wherein Xaa may be any one of Gln or His
MWTSFYMRCHRKSSTEHVFLLVLIAQKLRVSVGLHISXXKSPPSGKLCEHP

SEQ ID NO: 837 - DNA, 359 bp, Homo sapiens
  misc_feature (340): wherein any n is one of a or t or g or c
ggatccagagcagcgagaagctgagcgcggttattcgcgtagtggagggaggaagcggcctgaaagtggtggcgctggccagactgacacccataccttttgggcttcagaatgcagtgttttcgattattataagtataggcctcatgttttatgtagttcatcgagctcaagtggaattgaatgcagctattgtagcttgtgaaatggagctgaaatcttctctggttaaaggcaatcaaccaaataccagtggctcttcattctacaacaagaggaccctaacattttctggaggtggagatcatgttgtatgattctaatgagatacgtgattgtncagagcctagtgtgctatc

SEQ ID NO: 838 - protein, 56 aa, Homo sapiens
MFYVVHRAQVELNAAIVACEMELKSSLVKGNQPNTSGSSFYNKRTLTFSGGGDHVV

SEQ ID NO: 839 - DNA, 340 bp, Homo sapiens
  misc_feature (340): wherein any n is one of a or t or g or c
cctaggtgcttgggaagctgaggcagtgggacttcgaggttacagtgagctacaatcacactgctgcactctagcctgggtgacagagtaagatccgggacggggaagccttcatattccaggcgtaactgggggtcagggaaggcagcctgccagcagttcacatgggagacctcatctgttaggtacacttcctggagccaagacctcttagacgatttcaggagggtcctgtggtcacttgacaaatacaacattttgttgtcaaatcctcctgttatccccaggcaaaagtcctgcccatatctcaggacttgaccagtggcatctctgtgtactn

SEQ ID NO: 840 - protein, 85 aa, Homo sapiens
MLYLSSDHRTLLKSSKRSWLQEVYLTDEVSHVNCWQAAFPDPQLRLEYEGFPVPDLTLSPRLECSSVIVAHCNLEVPLPQLPKHL

SEQ ID NO: 841 - DNA, 396 bp, Homo sapiens
  misc_feature (1)..(396): wherein any n is one of a or t or g or c
ntggccacgtagagcttggggactgacgtgagtcacccccactgaggggtcccaggtgagccgctgttccctgaccaccccatctgttttcctccccagactatcagctctaccctgggccagcttggttcaggtgcatcccagaagtggcaggtctcaccggctcaccgccccccaatcccaggctcctccctctctccatcctgtgagtcctgaggggccggctccaggctgggctccccttaccaggcccaggtcccttcccagcaccaccactcctggggccttcagcttcaggctctgttgccccccaggcctcactgtgggatgcccaggacaggccctacacttcttctcccccagcctcccagggtcacagcccttgctgtccccatn

SEQ ID NO: 842 - protein, 60 aa, Homo sapiens
  VARIANT (60): wherein Xaa may be any one of Ile or Met
GAGSRLGSPYQAQVPSQHHHSWGLQLQALLPPRPHCGMPRTGPTLLLPQPPRVTALAVPX

SEQ ID NO: 843 - DNA, 409 bp, Homo sapiens
  misc_feature (409): wherein any n is one of a or t or g or c
gctagcagatcactcgtggtcaggagctgcagaccagtccggccaacacggcgaaaccatcatctaggtattgaatgcagtgatatgtcacaatctccttttttcggcatggcccaggcagaagtggtcagtcacatcaccttgatgttggactccgccatgtgtcataatacacagtatatccagggctcaggcagaagagaagagtcacatcatctagttgttggtccaattatatgttgcaatcacttgttttggcagaacctggagcgcagtccgtttgcagccggcggcaggtgaggtttcagcgcaggtagccagcggggttgaggcctggggggagcggagcggggcgccggcccctggagtcccacgcaggcgctcgttgcagaaggccccgcgttgtccn

SEQ ID NO: 844 - protein, 71 aa, Homo sapiens
MSQSPFFGMAQAEVVSHITLMLDSAMCHNTQYIQGSGRREESHHLVVGPIICCNHLFWQNLERSPFAAGGR

SEQ ID NO: 845 - DNA, 295 bp, Homo sapiens
ctcgagtttagcctgcagaagtgctgaaccacccagagttgttagccaaaatgtgaggttgagggcatggtcttcaagactgccaggttggcccaaacttctgacaccaactgcaaggagtttgggtcttactacaaagtaaggagcccagtcaccaagacttccctcacttctgacatcaactgcaaatatgaggggttcccaaaaccatccttaggttcaataatttgctagaaggactgacagaactccctgaagactgtatactcacagcaaagaatgcagatggaaagga

SEQ ID NO: 846 - protein, 55 aa, Homo sapiens
MVFKTARLAQTSDTNCKEFGSYYKVRSPVTKTSLTSDINCKYEGFPKPSLGSIIC

SEQ ID NO: 847 - DNA, 848 bp, Homo sapiens
  misc_feature (1): wherein any n is one of a or t or g or c
nctgcagagacagaaagaaacgcggctcttgacttcttttttgtaaacattactgtaagagttgtgataactttttattctactatgtatatgtatggaatagtattaataaatgaactagggaaggatgtaataaattagacatctcttcattttagagagaagatggaaacaacattgcttttcttttctcaaataaatatgtgtgaatcaaaagaaaaaacttttttcaagttaatacatggttcaggaaaagaagaaacaagcaaagaagccaaaatcagagctaaggaaaaaagaaatagactaagtcttcttgtgcagaaacctgagtttcatgaagacacccgctccagtagatctgggcacttggccaaagaaacaagagtctcccctgaagaggcagtgaaatggggtgaatcatttgacaaactgctttcccatagagatggactagaggcttttaccagatttcttaaaactgaattcagtgaagaaaatattgaattttggatagcctgtgaagatttcaagaaaagcaagggacctcaacaaattcaccttaaagcaaaagcaatatatgagaaatttatacagactgatgccccaaaagaggttaaccttgattttcacacaaaagaagtcattacaaacagcatcactcaacctaccctccacagttttgatgctgcacaaagcagagtgtatcagctcatggaacaagacagttatacacgttttctgaaatctgacatctatttagacttgatggaaggaagacctcagagaccaacaaatcttaggagacgatcacgctcatttacctgcaatgaattccaagatgtaca

SEQ ID NO: 848 - protein, 227 aa, Homo sapiens
METTLLFFSQINMCESKEKTFFKLIHGSGKEETSKEAKIRAKEKRNRLSLLVQKPEFHEDTRSSRSGHLAKETRVSPEEAVKWGESFDKLLSHRDGLEAFTRFLKTEFSEENIEFWIACEDFKKSKGPQQIHLKAKAIYEKFIQTDAPKEVNLDFHTKEVITNSITQPTLHSFDAAQSRVYQLMEQDSYTRFLKSDIYLDLMEGRPQRPTNLRRRSRSFTCNEFQDV

SEQ ID NO: 849 - DNA, 1067 bp, Homo sapiens
ggacatgtcaagcgtgccaaaccttgctctcctaagtttgcttctttccttacacgtgtgctcttaacctcctgccatgccttactattggcaagcagatccctagaacttaggctttacaatgttgactttagagtggcttctaggtcatttcttcttttttacaagtctgcctgtctactaatatgcatcaggtgagtacaagggatagaaaaggcaagaaacaccaaagaggtacttcgtttttattgtttaatctgggttcttaatgggtactcttgagctgtccgcattggtgggcattttaaaactaagagcacactaaaagtagaagataccatcacaatgcttatcctggagatgcttgctggggaacagctctgcagccagagcgccgtgcagggcagagtgtaaaactgaaagctggagggctggagaaacaaggactgttttaggttgagttaaagaagacttctgggatggggggatttcacggtgaatggatcttgtaggactggcaggtgggtgtaaggggggcacacatagagggccctgcacaggggacacttaagtactgtggtcctggtgctcagccttttcaccttagcacccctgatattcttttttctctcagtgaattaaaagctgttaccgatcatacagagtgcatttatgaagtagtaattagctttcccatgttttattaatcacatctgtgactgccaatcagagcttctgatcagcatgagataactggtgtgaccatactgagttgctgtaattctagcccagagcaaagaaacttgatgtctctgtcagtgtctgcagccttatcacggggtaaatttcctcgttcagccctacctgcaactgctgaaatagccttgaagatccctcatctactaccctttgtggacccctcgacggggcactcagctttgagaaggatcttccatccatggagacctggtataacctagggtaaagggttctacttgggagtcacgggagatatgggtcctgtctttgtattcattatactttgagaaggaatgaacatagaattc

SEQ ID NO: 850 - protein, 58 aa, Homo sapiens
MDGRSFSKLSAPSRGPQRVVDEGSSRLFQQLQVGLNEEIYPVIRLQTLTETSSFFALG

SEQ ID NO: 851 - DNA, 1400 bp, Homo sapiens
gaacctaggatgaaacactccatgtggggatctttatctaactagagaaacacgtgtcagatcagaaggggcctatgtgttaatgctgaatgagtttcattctacattgagaaattccaagcaggggaataaaataaccagacttgaattttactaaggccacttaggcaacagtgtggaatagatattggaggggtcacagatcaactaaggcaaagaaatactaagtctactacaataatctgggcttgaactaagacaattacgagggcacgtagtggataatttacagccttgctatattcagaagtggttctcaatcagcagcatgagcaccagttgggtactcgccagaaatacagaatcttaaagccatgccccttatcttcagaatcagcatttcagtaagctcctcagataatctatatagctaggaggtaccattcagaaataaggaatatagcaggggcaattattgggggaaaaagtcattattttaggtaaggtcagtttgaagtgaggatattctaaaaagttgatccatagcagttgggtgtctgggtgtggaggctaggatgaagtctggtttggagacagtttagcatttatcaacctgtatttgaagtcacggtctgacgcaagtttcctgggatttgctcaggaaaagtatatccagttagtgaggcagagggccctggagggagccctaggaaacaccattatctacaagtcccagacagcaaaaggtactccacaagaaacagaaggaacttccagtggtagcaaaagcaatgtgaggagtgggaagagagttccaagtggcaggatggtcaacattcgcattttccagcagaagtcacgtaagaatagacaagagtccattggatttggcaatcctgatgtcagggtaaagctaatgggtggagattaattcccattaagttctttcttgaccttagtatgtggggttgcaatttaaagattctgcattcaaagttcagatgagtagagtatgtggaaggagcttggtatggagccaacttgcaaatgttctcttccattagatggtaaattctttgaagcataaggaaggcacataaagatgagtaagacccagtcctaaccctcaaagtttataaacaatacgaataagacaactgtagtacaagatggggcattacaatttataaaatattatggggactcaaaagaggaatacaccatatgcagtcagaaaaggttgcttacttctcagctgttaacacagagaactgtacatactaaatacttaaactacattaattgcttttgcgctcaacaaatttggtgaattagtaataaagacaaagtcccattcatttcaaaatccaagcaaacttcaaactcattcatgagatatt

SEQ ID NO: 852 - protein, 60 aa, Homo sapiens
MLQRIYHLMEENICKLAPYQAPSTYSTHLNFECRIFKLQPHILRSRKNLMGINLHPLALP

SEQ ID NO: 853 - DNA, 865 bp, Homo sapiens
ttttttaaacacatttttttcctggcttcggacctcagactgctgcagccctaaccttcccagggctcagctctttggagctgcccattcctccggctgcgagaaaggacgcgcgccctgcgtcgggcgaagaaaagaagcaaaacttgtcgggagggtttcgtcatcaacctccttcccgcaaacctaaacctcctgccggggccatccctagacagaggaaagttcctgcagagccgaccagccctagtggatctggggcaggcagcggcgctggctgtggaattagatctgttttgaacccagtggagcgcatcgctggggctcggaagtcaccgtccgcgggcaccgggttggcgctgcccgagtggaaccgacagtttgcgagcctcggctgcaagtggcctctcctccccgcggttgttgttcagtgtcgggtgagggctgcgagtgtggcaagttgcaaagagagcctcagaggtccgaagagcgctgcgctcctactcgcgttcgcttcttcctcttctcggttccctactgtgaaatcgcagcgacatttacaaaggcctccgggtcctaccgagaccgatccgcagcgtttggcccggtcgcgcctattgcatcgggagcccccgagcaccggcgaaggactggcgggtggggtagggaggtggcggcggcggcatggcgaggttcccgaaggccgacctggccgctgcaggagttatgttactttgccacttcttcacggaccagtttcagttcgccgatgggaaacccggagaccaaatccttgattggcagtatggagttactcaggccttccctcacacagaggaggaggtggaagttgattcacacgcgt

SEQ ID NO: 854 - protein, 60 aa, Homo sapiens
MARFPKADLAAAGVMLLCHFFTDQFQFADGKPGDQILDWQYGVTQAFPHTEEEVEVDSHA

SEQ ID NO: 855 - DNA, 398 bp, Homo sapiens
acgcgtcctgaagccgtcgacacggcgagaacagcaggccagcagctcgatatcagtggcagatagccagcggcgactgagcgtgcgccatgatgccgcgactcacaccacctgcggtccagcccaaaatcgggtgcttcttcataccaaccacgaggaggtcaacgctgcccgagaggtcgactaaagcgtcgacgggctctccggacagcacgcgggtctctacctcgacatggggatgctcattggcgagcggcttgacaacctcgttgagtcgtttgagggcctcgtcgcgcacctcttcggagtcgttaccaggaaccgtcactgcgagcagcttgcagccacggtggtcagcttcagcgaatccgaatccgacagctgcagttcctacgctc

SEQ ID NO: 856 - protein, 103 aa, Homo sapiens
MMPRLTPPAVQPKIGCFFIPTTRRSTLPERSTKASTGSPDSTRVSTSTWGCSLASGLTTSLSRLRASSRTSSESLPGTVTASSLQPRWSASANPNPTAAVPTL

SEQ ID NO: 857 - DNA, 390 bp, Homo sapiens
tcatgatggggaaactccccctgggggtcgtctccccttatgtgaagatgagttcggggggctacacggaccccctgaaattctacgccaccagctactgcacagcctacggtcgggaggatttcaagccccgtgtgggcagtcacgtaggcaccggctacaaatcaaatttccaggccgtggtctcatgccaagccagtctggaggccttagacaacccggccaggggggaacaagcccaggaccatttccagtctgtggccagccagagctaccgccccctggaggtgcctgacggccagcatcccctgccctggagcatgcgccataccagctcaggctatgggcgggagaagcccagtgcgggtccccccaccaaggaggtccgga

SEQ ID NO: 858 - protein, 129 aa, Homo sapiens
MMGKLPLGVVSPYVKMSSGGYTDPLKFYATSYCTAYGREDFKPRVGSHVGTGYKSNFQAVVSCQASLEALDNPARGEQAQDHFQSVASQSYRPLEVPDGQHPLPWSMRHTSSGYGREKPSAGPPTKEVR

SEQ ID NO: 859 - DNA, 349 bp, Homo sapiens
  misc_feature (214): wherein any n is one of a or t or g or c
cctagggtcacagtgtatagcagagttcaggccgtcacccaggcaggactgagaatagatgagcacattgccccagatgcctcctgtttgtagttgtctccactcctcctgcccatgccccgagctgaagctcctgactgcaggcccttgatggatgtttgcagctgtatctccagtgccagcaacagctcaggcacgtgccagggggacatanagagccctgaaccaggatccccacagacgcgaggaaggacaggacccatggcctcctcatggagcctctagggcaggtttcgactgaccgactgttacaggggtcagcactggttctcaaaagggccgccccatt

SEQ ID NO: 860 - protein, 79 aa, Homo sapiens
  VARIANT (21): wherein Xaa may be any one of Ile or Leu or Val
MRRPWVLSFLASVGILVQGSXCPPGTCLSCCWHWRYSCKHPSRACSQELQLGAWAGGVETTTNRRHLGQCAHLFSVLPG

SEQ ID NO: 861 - DNA, 381 bp, Homo sapiens
  misc_feature (361): wherein any n is one of a or t or g or c
tgatcatcatgtcctgcacggacaagatcgccagctggagtgaaaacagcgcatttggtgcaaatgtggtctccgggtgccacccccaactcccaacgaggctgtggccctgagaccctctgtaaggacgttttgtggtggagccaggcaggagatgcaaaggcccctacagctctgctccccgggatctacacagaccggcttctggactccaggcagatgaaaccccagccctaacaacaatggttccaccttctcatggaaatcgtgggagagctggggaaaatggtgccctttccttcctggctctgggcactcctggctggggagccacagggtcagcctaatgacagtggaccanagccgtggtttctgcatcaa

SEQ ID NO: 862 - protein, 123 aa, Homo sapiens
MQKPRLWSTVIRLTLWLPSQECPEPGRKGHHFPQLSHDFHEKVEPLLLGLGFHLPGVQKPVCVDPGEQSCRGLCISCLAPPQNVLTEGLRATASLGVGGGTRRPHLHQMRCFHSSWRSCPCRT

SEQ ID NO: 863 - DNA, 381 bp, Homo sapiens
  misc_feature (1)..(21): wherein any n is one of a or t or g or c
nacatcacatctatgagactncgggacactgggagcgatacctggcaagtcagagaaccgaccaacaagttcgagagaggaacggctgacaccttcatcatcgaggccgctgacctaggcgtcatctacaagatcaagctccgccatgacaactccaagtggtgcgcagactggtacgtggagaaggtggagatctggaatgacaccaacgaggacgagttcctgttcctatgcgggcgctggctctccctgaagaaggaggatgggcgactcgagaggctcttttacgagaaggagtacactggggaccgcagcagcaactgcagcagccctgctgacttctgggagatcgccctgagctccaagatggccgatgtcgac

SEQ ID NO: 864 - protein, 127 aa, Homo sapiens
  VARIANT (1): wherein Xaa may be any one of Asn or Asp or His or Tyr
XITSMRLRDTGSDTWQVREPTNKFERGTADTFIIEAADLGVIYKIKLRHDNSKWCADWYVEKVEIWNDTNEDEFLFLCGRWLSLKKEDGRLERLFYEKEYTGDRSSNCSSPADFWEIALSSKMADVD

SEQ ID NO: 865 - DNA, 413 bp, Homo sapiens
cctagggtcctgttgacctgggtatgaattcgggctccgttgccacatgagctgtgtgactttggacaaataacttaacctctctgagactcatattctcatctgaaaaacagggaaattagagtatctttcttacatgttctttgaagaactttttaaatatgctttttttttttttttaaaaaataaaatctggcttttttgcccaggggggagatacaggggcaaatcacaggcatgatcctcatacattgtagcctcccactccggggtttcaaggtgattctccgtgcctcacccccccaagttagctgggactacggggtgtgtaccactgccccgtggttaaatatatttttttttttttgggtgaaacaaagtctcactctgtcactcaggcgggagggctgggg

SEQ ID NO: 866 - protein, 58 aa, Homo sapiens
MILIHCSLPLRGFKVILRASPPQVSWDYGVCTTAPWLNIFFFFWVKQSLTLSLRREGW

SEQ ID NO: 867 - DNA, 421 bp, Homo sapiens
  misc_feature (1)..(2): wherein any n is one of a or t or g or c
nncccgggcagtgggccaccagtgtttgcccccagcaatcatgtcagtgaagcccaacctcgggagacaccccggcccctcatgcctcctaccaagcctttcctagcacctgagaccaccagccctggtgacagggtggagacccctgtgggggagagagccccaacccctgtctcagcaagctctgaggtctcccctgagagccaagaggactcagagaccccagcagaggaggacagtggctctgagcagcctcccaacagcgtcctgcctgacaaactgaaggtgagctgggagaaccccagcccccaggaggcccctgctgcagagagtgcagaaccgtcccaggcaccctgttctgagacttctgaggctgcccccagggagggtgggaagccccctacacccccacccaagatct

SEQ ID NO: 868 - protein, 140 aa, Homo sapiens
  VARIANT (1): wherein Xaa may be any one of Phe or Ser or Tyr or Cys or Leu or Pro or His or Arg or Ile or Thr or Asn or Val or Ala or Asp or Gly
XPGSGPPVFAPSNHVSEAQPRETPRPLMPPTKPFLAPETTSPGDRVETPVGERAPTPVSASSEVSPESQEDSETPAEEDSGSEQPPNSVLPDKLKVSWENPSPQEAPAAESAEPSQAPCSETSEAAPREGGKPPTPPPKI

SEQ ID NO: 869 - DNA, 396 bp, Homo sapiens
  misc_feature (1)..(322): wherein any n is one of a or t or g or c
naagctttcctctgatgtgcggtattttcttcaatgctatttctttcttttttttttttttttggaaagggagtctcgctctatgggcgggttggagttcaggggcacaatctcggctcactgcaacccgcgcctcccggattcaagcaatttccgtgcctcagccttctattagcgtgggactacgggttcacgttaccantcccggtaaatttttgtatttaaataaaagggggggcttcaccagtttggccaggatggtctcaattttttaaccttgttaactccccccgccttggcctcccaaagcgctgggattacnggggggagcccccgcccccgaccttttttcaggtgcaattttaaaaaaaaatttattctttttttattttttaa

SEQ ID NO: 870 - protein, 63 aa, Homo sapiens
  VARIANT (57): wherein Xaa may be any one of Ile or Leu or Phe or Val
MLFLSFFFFFGKGVSLYGRVGVQGHNLGSLQPAPPGFKQFPCLSLLLAWDYGFTLPXPVNFCI

SEQ ID NO: 871 - DNA, 495 bp, Homo sapiens
cggccgcaaggacctgagattgcaccactgcactccatccagcttgggcaacagagcaggactctgtctcataaaacaaacaaaacaaaacaaccctcttcatttcttgtttccatcagagtccttcaaggagattcatcctcttggttattagactctcctccaaatgccactgagcactacctgcatccaagttgatagacccgctggctgcgcaccctctgcgctagtgtaggacttcccaagtgcgctcctgacgaagacgtttgcacaggacgctggggtgaatgctcaggcctgccccaaacccctgcagacagccccttgggatcaacgccttagcctggcttcaacccatgctgggcggggaggccgggtctgtagacacagaggtgaaggatgtactcacactgccgagtgcctcccgagactggcaggacaccagctcactgtggacgagatgccgagacctctgtggccatggccgtcgcctcc

SEQ ID NO: 872 - protein, 69 aa, Homo sapiens
MLRPAPNPCRQPLGINALAWLQPMLGGEAGSVDTEVKDVLTLPSASRDWQDTSSLWTRCRDLCGHGRRL

SEQ ID NO: 873 - DNA, 963 bp, Homo sapiens
tttttttttttttgtgaataaacgggctgacatttcatgttcctggagagaacttagtatcccatcccacattgtttcgcgatttaacattaacattgtttcgcgatttaacaaaagttactaattagaacaaaagttattgattagaattaacttattagaaaaacctggacaaacataccctaaagtgcagccaggtgatcactcttcttgatcacctatgtaatgtctcatagagtactctggtgtgaatagcaatttccaaaggtctttcactttgcatttttctttgtatccagaatcgataaagttaccaggactatttcacagtaattagacttacaaaatcttaacactaaatagacgctaaggctatacattcttccaatgtctcaagtctattgctggccatcaggagcacctggatacgtagaacataagaaagtttgcgaaaaaggaatcaaagcaacaggaggagtctggtttgaacggttatttcaaccaaattacattaaggactgctaactgttttctgccccacaaaaataccctttgtaaatgtttccaaactataacacaggtcctcctggagcaacggctagataaattaacaaacttttagactttacgctccccttttccaaactccaagtcgaccactccccatttgttaacagaaacttactataactgattagatttctaacctttcctagggagagccagttcaattctaaaagggttggtcacatgggttgctaaattaaaatataaagcatttcctaacagggaagggaggctggtcaattgtggttatttttatcagtaactttaaatatggatccatagattatcaatttatggctgtcgtgggtgttagaagatgacctaatcccatccccattttcatttaaaaaactgaaactaaagctctgtaaaatcaaatgatttaaaatcatctga

SEQ ID NO: 874 - protein, 51 aa, Homo sapiens
MILNHLILQSFSFSFLNENGDGIRSSSNTHDSHKLIIYGSIFKVTDKNNHN

SEQ ID NO: 875 - DNA, 644 bp, Homo sapiens
ttttttttttttttgtgctcataacactttatttataaaacaagaacagtgggccatagtttgctaacccctgcactagcccagtctaagtcttgaatatcatctgtgtaattaattcacagtgaggagttctccactgtaataattactcattccatgaatgcatgccactcaggtgaggcgttcttgaaactctgagaggcaagaagcaaaatgttctttctccatacccaggcacactccagtctgtgaaaaggaagcaagagaggcaggctgcaagtttgatcactgggtggctgctagccacctctccccctcagctccaagagcagaaacaggatgaaaacgcagcagctgccggcttctgtcctcttgccagctgcctctcttgcaagactagacagggaggggcagccgccagtctccggaggcacagactgcacagaattgaggatcacttgttccaatgcattcatcttatcttacaaaatcttcaaattccaaaaagcacacgtaagaagggctgctgtttcattcacacagtgaaatattgtgcatctgaaagaatatgtagatgggtggcatcttcaacaaccccaggatcacagacgtttaaatttcaccccttctactgctggtacgca

SEQ ID NO: 876 - protein, 68 aa, Homo sapiens
MKTQQLPASVLLPAASLARLDREGQPPVSGGTDCTELRITCSNAFILSYKIFKFQKAHVRRAAVSFTQ

SEQ ID NO: 877 - DNA, 1181 bp, Homo sapiens
ttttttttttacgatccattactttattcattaaggattttttgagtaccttctctataccagctgttatgcagattctaaggaatgcagatgaaaatgtatacagtgtcttctcccccataagcttgaaatgttcatggaaaacaggcaaataaccagatatgcacaatacaatatgaccagtgctataaaggaaggccagattctgaggaatcaaaggggattgtcatggaaatgtgatgtgagctgatgaagactagggatttgccaggcagctatgtaggatgagagaaagaaaagggcagttttctgggtggagggaaccatgtgtgcagatctcagaggtctctagtacctcagtactatgggaatgccagttacagtgggtagggaagaagcagcatttcaagaaatcaagctaaaaagatcatagacaaggggccagaccacatcaaatctttattctacccattcttcctttgaacaggaagagaaaccaagtcaaactagctgcataatgaagtttgactttttagtttcaggtgtctactcccaagtgactgcagtctccatgtctcttaattcatgctctcaagagagagagaatctgatcagtcactggtcagctgtccaagtcagatgtttgtccctcttttgggtgataggatgacctaggtatgtatgtgtatggattgggggaggttgaactggctctatccaagtttgggatcccgtggtagggatcacctttccaggaacaatggatgggaatgtttccctctgaaggctttattggcaatataaataatcttgtgcttttcaattatgccaatgtcgtgttctagttgtttcatttcttcttccagcctctgcttgcggatcttctttggtatagaatctataaagaccgagagggactggaattctttatgcacctcttcccagttctttttcagcccctgcaaaactgcctccctttcttcatcggagagccttttcatagctgctttcttaaggttttcctggatataacgatcatagtcttcttgggctttctttatttcctcgtttcgcttacatatgtattcaggtgtgacaccataatcctaggaggctggggaggctccttcaagtcactgggtatgaggttataaatgcactcagaagagcacgttggatcc

SEQ ID NO: 878 - protein, 85 aa, Homo sapiens
MKRLSDEEREAVLQGLKKNWEEVHKEFQSLSVFIDSIPKKIRKQRLEEEMKQLEHDIGIIEKHKIIYIANKAFRGKHSHPLFLER

SEQ ID NO: 879 - DNA, 511 bp, Homo sapiens
  misc_feature (491): wherein any n is one of a or t or g or c
actagtcctgaaggctcaagatcatgcttgtctccagttcttttatcaacataaattggtttaggctttttagccactcccatgatgatatcagctgcatttgtatttataaaattttttccactctgtattcccatgacaggatgatcagtcttcaatggcacagcaggctttttgggcacgttccgatcaaagttttttttgggtggtagagttttttcctttgaatgtttctttaggaaatcctttggagaaggtacttcaacttttgctggtcccatagttttcattgcagttttagctttttgcatgtcatcttttacagttgccttaaaaatggatatgtacctaggaggctggggaggctccttcaagtcactgggtatgaggttataaatgcactcagaagagcacgttggatccatggccaccaaatgactccttaaaagctactctccacaacttttttctccctgtcccagaatctccgnccctttcttcactgcttccc

SEQ ID NO: 880 - protein, 141 aa, Homo sapiens
MDPTCSSECIYNLIPSDLKEPPQPPRYISIFKATVKDDMQKAKTAMKTMGPAKVEVPSPKDFLKKHSKEKTLPPKKNFDRNVPKKPAVPLKTDHPVMGIQSGKNFINTNAADIIMGVAKKPKPIYVDKRTGDKHDLEPSGL

SEQ ID NO: 881 - DNA, 827 bp, Homo sapiens
  misc_feature (61)..(62): wherein any n is one of a or t or g or c
gctcgggaccgccctcggacggcaccgcgggcttcgtgggtccccccgccccgcgcgtccnntgcagaacttccaccccgacgaggcggagagcgatgaggacaacgacgtcgtcatcgagggcacactggagcctgcacgtcccccccagaccccgggcgcgcccgcaggcagcctctcccgggtcaatggcgcgggcctggcgcagcggctgcagcgggacctggccctggacggcggcctccagcggctgctcagctccctgcgggccgacccccgtcacagcctggcgctgccgccaggcggcgtggaggagcacgggcccgcggtcacgctctagactcccgagaggcccccaaatcctagctccagttccccggtaaggacagggacaggacctgcagactgcatccgctcattttttgttgtttttgtaccacaaaaacaacgctgctctttgtttcaacttccggatataaaaacacaagtattgcctatttttatagaatttcgccacagaacttaaaatgaacgcctgtagagacactctataccaggcctgagtgcaggtcttggcgcctttgcaaagtgatagaaaagatctgaccaagtgcaaaaaaatgctttttaaaatttttacaaatactttgtttttaaagtgaagctttaaaattacttttttaaaatagtcaaattcatgtttttaagtaagttggcccatgcaacatgtctcagcattcttgctgtgctctctgctgacttgcaggcgaggccgactgtgctgatgtacgtgacaagaggctggtttttataacgaatgcagccgg

SEQ ID NO: 882 - protein, 88 aa, Homo sapiens
GQRRRHRGHTGACTSPPDPGRARRQPLPGQWRGPGAAAAAGPGPGRRPPAAAQLPAGRPPSQPGAAARRRGGARARGHALDSREAPKS

SEQ ID NO: 883 - DNA, 480 bp, Homo sapiens
cccgaacgtggtcggttggagaaaatatgtccctccggaggcacattgggaaccctgagtatctgatgaaaaggataccacagaacccaagataccagcatatcaaatcaagactggacactggtgcctgtgtgtatcttaccagctccccagcactgccagactgtgccatgaatggattatgcttctgatgaaatccctggctgcgttttgttcagtcaccaccgcagggttcttgtatattctcaagcaccctctctgggtttctgttttgcagcactgcaggctgattaagggacactttccaaaccacagggctctccctttattagtccccacagtctttcattggctgcattgtcctcccatttctatctatattcaatctaatttccaatttctttagctttctgaaattctgtaggctttctccactcagtcttttctagccttatttttgtctttttaaaaattcacctt

SEQ ID NO: 884 - protein, 74 aa, Homo sapiens
MLLMKSLAAFCSVTTAGFLYILKHPLWVSVLQHCRLIKGHFPNHRALPLLVPTVFHWLHCPPISIYIQSNFQFL

SEQ ID NO: 885 - DNA, 812 bp, Homo sapiens
  misc_feature (752)..(782): wherein any n is one of a or t or g or c
atgactaaatatactgagaagctcgaagagattaagaaaaattatagatacaaaaaagatgagcttttcaagagactaaaagttacaacttttgcctagctgatcatccaagttgcttccctctctgatcaaacactggaagtgacagctgaggagattcaaaggctggaagacaatgattctgcagcttcagaccctgatgctgaaaccactgccaggaccaatgggaaaggaaatccaggtgagcagtcgccgagccctgagcagttcataaacaacgcaggagcaggggactccagccgctcaactcttcagagtgtcatcagtggtgttggggaactggatctagacaaagggccagtgaagaaagcagagccccataccaaagacaaaccttatcctgactgccccttcctgctgctagatgtgcgtgatagagattcttaccagcagtgccacattgttggagcttacagttacccaaattgcactctgtctagaacaatgaacccttattcaaatgatattcttgaatataaaaatgcccatggaagatcatcattctgtatgacgatgatgaaaggctggccagtcaggcggccaccaccatgtgcgagcgtggatttgaaaacctcttcatgctttccggaggtggagcaaggtctaaaagtcttagctcagaaattcccggaagggactggatttactgggttccctggccagcatcttggccagcagggccctttccttcntgggggtctggcccgggnaacggttccagnccccaaaggggcaaccccttaccagctgga

SEQ ID NO: 886 - protein, 102 aa, Homo sapiens
  VARIANT (83): wherein Xaa may be any one of Arg or His or Leu or Pro
  VARIANT (89): wherein Xaa may be any one of Ala or Glu or Gly or Val
  VARIANT (93): wherein Xaa may be any one of Asp or Gly or Ala or Val
MNPYSNDILEYKNAHGRSSFCMTMMKGWPVRRPPPCASVDLKTSSCFPEVEQGLKVLAQKFPEGTGFTGFPGQHLGQQGPFLXGGLARXTVPXPKGATPYQL

SEQ ID NO: 887 - DNA, 2027 bp, Homo sapiens
ctgaggatacagccatcagcagcttgcgccctccctctgctcctgagatgctgacccagcatggagcccaagagcagctcgaagaccatcctggccatagcagccaagcccccattcccagagcagaccctctccccagaaggacccgcagcccttgttattgcctcgcttagatccaggacagagaggaaacaagcttcccacgggggaacaaggcctggatgaggatgttgatggggtctgtgaaagccacgcagcccctggtctggaatgcagttcaggctcagcaaactgtcagggtgctggcccctctgcagatggaatcagctccaggctgacaccagcagagtcctgcatggggctcgtgaggatgaatctctacactcactgcgtcaaagggctgatgctgtccctgctggctgaggagccgctgctgggagacagcgcagccatagaggaagtgtaccacagcagcctggcttcactgaatgggctggaagtccacctgaaagagacgctgcccagggatgaggcagcctccacgagcagcacctacaacttcacatattacgaccgcattcagagcttgctgatggcaaacctgccgcaggtggccaccccgcatgatcgccgcttcctccaggccgtcagcctgatgcatagcgaatttgcccagctgcccgcgctttatgaaatgactgtcagaaatgcctccacggctgtgtacgcctgttgcaaccccatccaggagacatatttccagcagctggcacctgcagcacggagctccggcttcccaaaccctcaggatggcgccttcagcctctccggcaaagcaaagcagaagctgctgaagcacggggtgaacttgctctgaactgcacccaggaggtgactgggaaggagaaaaccagcaaaggaagctctgccttttataattgaaaaggcccctctattttatttttcttgaaaacattcccttttttaggaaccaaatgatatttgagtttttgttattccttttgcagattgggatgtgttttgggggcaggggttagttcttcaggtcggcagaccagagcacttgataaagaactgtatttaatcggtagtgttggggccgggacggcttggctccctctctgccatactgagcctgaggtatttcatatctcctgctgttccatcccagcttgaattggtgccacaagcttccaagttggcattttttctagaacctgatcgtccactagcccagagtgtgtgtgttcaacccccacaccaggtggtggtaggcggtgtgactgcacagcgaggtgccggatctgtgagcaggccgactccactcccacgccgcaggtaggtttctccagtgcgctcttgctgggaggtccggatcgttcctgcagggaagcggcacgacacggagaccacttggttgaattctgttggaactctactcaaatctaggggcgtcttctttggacccacaatgggggcaagccttaataatatggaagggagtttgggctttagagatccctttataaaagctctgggggctgagccctgagaattcagtgacaacaggaccaacctgcgctgcctttgactacaagtgggccgtgcagctggttcctctcgagcgagtgtccctaaataggagtttacaagatgtctgggggtaaaagcactgtgcttttcagtggtggctgcgtgaaagggagcgacactcagctgtgtgttcctgggcttgtgtggtacttagaacctcagttctattacgttatagtcagacatttttttgacagtatgagacagactgcaggatgaaaatatttgtcaaaatcttaactgaatgtttactggaagtacttgagattccatttgagagttgtattgttaataatttcatgtcagtgaactgatatctgatgtttatgatatggtgtctttttcttgaaacaagcttccaagggctagaaataaaatagccaaaaaatgctggagttctgagtaaaaaaaaa

SEQ ID NO: 888 - protein, 173 aa, Homo sapiens [sequence omitted]

SEQ ID NO: 889 - DNA, 1207 bp, Homo sapiens
  misc_feature (1)..(2): wherein any n is one of a or t or g or c
nncggcacgaggacttgtgcatcagatcgaaccccaaagatacggttacatactggtcttcttcttgttcaactgtgtggtggtgaaaggtggtggggtcaatttctttctaatgtccttcaggaattgtacaattcggaacagcttctcatctttccacaggatagggtcttcatgttactttcctgcattggtcaaagatcacttagtaatagtggagtattagaaagcttacttaatctcttggataatttattgtcacctcttcagccacagttacccatgcataggaggacagaaggagtactagatattcccatgatcagttgggttgttatgctggtgtccaggttgctggattatgtggcaactgttgaagatgaagcagcagctgcaaagaaacctttgaatggtaaagacagggagaggtttctgacaggtaatcagtggagttttattaacaataatctacacactcagagcttaaatagatcttctaaaggcagcagtagccttgatagattatattccagaaaaatcagaaagcagcttgttcatcataaacagcaacttaacctactaaaagcaaagcagaaggcattggtagaacagatggaaaaaaaaaaaatacaaagtaacaaaggatcatcatataaactcctggtagaacaagcaaaactaaagcaggccacttcaaaggtatgatctatacttttcaatatagttatctcagaaaagtcaaggagttatgatctttaattacgatcgagaaacttaaatatacattactctgcttaacagagaagccaacctactctggacttttttttggtggggtagtttaactgaaggaaatgtatgataaatgtggtatttaagtattattgtaatgtattaccttcattgtggattgagttccagtaaattgaagataaaggatagtggaatgtatagttttgctaatgtggcattgatagagcagtttatttccattttacaatacaaaattatacaagatgattgcaaatattattgtatcagcctcacaaataaaatgtatatgtaaagtgaaaaatgtggcattctctttacccttagtattgttattggaatattttggtggctgagtttagaattgaaacttctttgggtccagtggtgctcacaaggctcaaatgtagtatgtcttttcgtaagtgaaagttga

SEQ ID NO: 890 - protein, 234 aa, Homo sapiens
  VARIANT (1): wherein Xaa may be any one of Phe or Ser or Tyr or Cys or Leu or Pro or His or Arg or Ile or Thr or Asn or Val or Ala or Asp or Gly
XGTRTCASDRTPKIRLHTGLLLVQLCGGERWWGQFLSNVLQELYNSEQLLIFPQDRVFMLLSCIGQRSLSNSGVLESLLNLLDNLLSPLQPQLPMHRRTEGVLDIPMISWVVMLVSRLLDYVATVEDEAAAAKKPLNGKDRERFLTGNQWSFINNNLHTQSLNRSSKGSSSLDRLYSRKIRKQLVHHKQQLNLLKAKQKALVEQMEKKKIQSNKGSSYKLLVEQAKLKQATSKV

SEQ ID NO: 891 - DNA, 536 bp, Homo sapiens
  misc_feature (1)..(448): wherein any n is one of a or t or g or c
nggggtttagatccctaaggctctcccctccagactccgcccttccctccctccctccctccctctctgccaaggctccagcttcttcccccagctgctcccgaccaggagggggagagcagcctccacttaccccaccccacccttgggctaaaagcccccaggcgggcagggggtgacccctggagctagttgcgtgtcccagaatggagggtgttctgacaccccaccctgagccgcaagagcagtcctggggccctggacccctctgtacagtccgtaggaaaaagtcggaatgctctcgacggcctcgtcccagcctgggacaggccccctttcccctctctctgcaggccaggagggcctccttcctgccacgagggaggggagtcgggccccaggtcgcccccgcccccagccctgcatgcaggtgccctcgctccgcccncatcagttcctgcccctgcccctcatgcagactgccctgctggggccgggccggagggtggagcataaaggggaccccggagccgagc

SEQ ID NO: 892 - protein, 97 aa, Homo sapiens
  VARIANT (76): wherein Xaa may be any one of Ala or Pro or Ser or Thr
HPTLSRKSSPGALDPSVQSVGKSRNALDGLVPAWDRPPFPSLCRPGGPPSCHEGGESGPRSPPPPALHAGALAPPXSVPAPAPHADCPAGAGPEGGA

SEQ ID NO: 893 - DNA, 794 bp, Homo sapiens
  misc_feature (1)..(2): wherein any n is one of a or t or g or c
nngggcgtggtggccgggctgcggcgcttcgggtgcgtggtgtgccgctggatcgcccaggacctcagcagccttgctgggctcctggaccaacacggcgtgcgcctggtgggcgtagggcccgaggccctgggtctgcaggagttcctggacggcgactacttcgcgggagagctctacctggatgagagcaagcagctttacaaggagctaggcttcaagcggtacaacagcctgagcatcctcccagcagctctggggaagcccgtgcgtgatgtggctgccaaggccaaggctgttggcatccaggggaacttgtctggggacctgctgcagagcggagggctgctggtggtcagcaaagaagtccccaggcgactacgtccccaaggagcacatcctgcaggtcctgggcatctctgcggaggtctgtgccagcgacccgcctcagtgtgacagagaggtgtgagggaggcgaagccctggcctccgaggatctgggtggcgtctgctgccctaggtgtgctggaagtccacttggaagaactgttccggaggcgctgggtcgggatgccgaacctctcctgatccgccggcagcaacgagccattaaaactgcagttcctgaccacgcactgcttcgcaggctccgagccctgcatcctccacagcccccgccttgctcactgttgggccctcaggcgggcagggtggctgtgagtcccaggtgtcatcttcctgctctgcgactttctctggagaccttgggcctttggcttgtggggcactgggga

SEQ ID NO: 894 - protein, 151 aa, Homo sapiens
  VARIANT (1): wherein Xaa may be any one of Leu or Ser or Trp or Pro or Gln or Arg or Met or Thr or Lys or Val or Ala or Glu or Gly
XGVVAGLRRFGCVVCRWIAQDLSSLAGLLDQHGVRLVGVGPEALGLQEFLDGDYFAGELYLDESKQLYKELGFKRYNSLSILPAALGKPVRDVAAKAKAVGIQGNLSGDLLQSGGLLVVSKEVPRRLRPQGAHPAGPGHLCGGLCQRPASV

SEQ ID NO: 895 - DNA, 1161 bp, Homo sapiens
aaattattgcatttgatctggatggattttaaaagaatataatgttcaatattaaaaggataattcacatttgccaccataatgttcttttttatgtaaaaagaagaacttggagacattaacatgaaaaagtcttttatcattagctcatgtatttgaggaagagcagctgtctttttatatgttttttgacaaatcatattgtattcttttgtacaaaaaagaactacttgtattctagaagaaatatgaaatgcttaatttataagcgggctggagattttttccaatattgttttctttgaaaatgaaaggggatcatctattttagttttggggtctgggaactttttgaaaatttaatttgtggaccaatgttttgtgaaagctaaagagggcaggggttaaaatagggcttgaatttctcattctgtatagaccagcaaacttccctgtgcaaggcaagtttacatcacaaatccaagaatgtttgcatcctaaatgctagtttgcttcagcccctagttaacctcaggacttggtttgcatataaaaggtagacagctgatatgttttcatgaataaatattgtcagccagaaaaggttggtgtcaggtaatgcatatttttttaagctttgttttatatttatttttcatttagtttttattgggaatggttttcaaagaactctcagttctgcctaggtgtttttgggggagccctgttttccatagtgtaattccatttaagaggttgtctaaaagtctttttaattaatagaaagattttaatatccaagagtagtcaaattaaggatataaactttccacaccttcctgtcgtgacagataaaagcacagaaaggacaacccttgaaatcatgtaacgttggtcatttcaatattttgtacctgttttaaattctgttagtgtatttacttcattgtaaatatttttgagggtacctttgtattttgcttttgaccttggttctgtgatttggatgtcaacaacttccctaaaaagcaccagtgtgttaggttctaatgtcatgacccaatttgtgttattcatctttaatcctgttttcagtctctatgtgtacagcagtatttttaataaagaattacagagataaaaaaaaaaaaaaaaaaaaaa

SEQ ID NO: 896 - protein, 66 aa, Homo sapiens
MICQKTYKKTAALPQIHELMIKDFFMLMSPSSSFYIKKNIMVANVNYPFNIEHYILLKSIQIKCNN

SEQ ID NO: 897 - DNA, 425 bp, Homo sapiens
ctgggggagcctcgagacttgcaacgacccagacccaattccctgaggccccagcctgtggtggcagggcccacagcctgcgatctctgcataccctggatttcagaggtcactgcagtcaggccacctgaggacacacacctgagggtggtgcccaagccaagactctctctagggatgtccacgtgaccccagagaagcagcccaccccacagtccacccacagccttcgcgcctctccaggagctgggccacttttcacacacaggatccacgtcttggttattatcgaacacgcttggagcttcccaagactgcagttttaaaagaaatggcggagttggcagtatttggaggtagtaatgaattttcatctttgttctcctataggaacgtttcagagctgagtccaaatatctaattga

SEQ ID NO: 898 - protein, 124 aa, Homo sapiens
MKIHYYLQILPTPPFLLKLQSWEAPSVFDNNQDVDPVCEKWPSSWRGAKAVGGLWGGLLLWGHVDIPRESLGLGTTLRCVSSGGLTAVTSEIQGMQRSQAVGPATTGWGLRELGLGRCKSRGSP

SEQ ID NO: 899 - DNA, 468 bp, Homo sapiens
acgcgttcctctacctagcattttggattactcttggagctggttcttcccctaagtaggactagctgagagctgagtgcattttagcaaaggcttcacctacatcggaagtaaagagttgcagtcaggctttggatcaggcctcactcctgatttctgctcctgcagccatcccgttgtgtctcactctcccttccagtgatggtcgcagctcccagtctctggattatcagataatgcccttgacttctgggggctcattcacagtctctgtagtttcttcttcttcccacgtgttcacatgactcctgtcctcttgagatctgacctccttctggaatggacacatatgctaagatgcagtgtatgcacaaggaaggcctgtgagagggctttgtcactctgtctccttcctgtgtgcacctctctgtctccatgtgtgtctctgtcccctttccctctgtctcc

SEQ ID NO: 900 - protein, 59 aa, Homo sapiens
METERCTQEGDRVTKPSHRPSLCIHCILAYVSIPEGGQISRGQESCEHVGRRRNYRDCE

SEQ ID NO: 901 - DNA, 612 bp, Homo sapiens
cgaatatcctgcagccgcgcccttcttcccctactgcgaggagccaccgcctctttcgcgctccttatacacctatcactgggagcggtggcagcaacattccctggaccaaccgccgcctcttcaggcggccgctttgccggtcattcccgaagcccggcaactgagggcggccccctttccttaacagtctcctcgctacagatcgtctgctccctcagcctcgcccgagacccacttccccagtctcgcccgggtggaggtcgacgaggaggagacaagagtcacccttcctccaggcggcgccggccccctcacccgcgggtgtgtcctataaatggcgtcggaaagcgacaccgaggaattctatgatgcccctgaagatgtgcacctagggggcggctaccccgtggggaaacagagaacactgcatacaaagttggaaatgagtcccctgtacaagaattgaaacaagatgtgtctaaaaagattattgaaagtattattgaggagagtcagaaagtactacagcttgaagatgactctttggattccaaaggaaaagaactctctgatcaagctactgccagtcctattgtggctagaacagat

SEQ ID NO: 902 - protein, 77 aa, Homo sapiens
RCAPRGRLPRGETENTAYKVGNESPVQELKQDVSKKIIESIIEESQKVLQLEDDSLDSKGKELSDQATASPIVARTD

SEQ ID NO: 903 - DNA, 670 bp, Homo sapiens
caccatgccaggaggatgctcaagcagccccaaggagaaggccatgcagagaggacggaagcagccagtgacaacttgccagacacaggttgcgcccctttggaaatggattctccagcccctattgggctttggatgatgtagcctcagctgatatctgactggaactgtatgaaaggcttcacatgagaacggtccggtcaggtccttctgaaatgcctgacccacagagacactgtgagatgaaagagtccaagacacacttatccatcacagcgatcatgcctgtaagaaaactcttcttactgcactcctacctggaactgaaagatgatgtgttcggcttcaatagatcctgctcttcacatcagggacagtagtcaatacttttgtatttggacactgggaatcaaggcagaagatctaacagaagatacaaaataattataatacattaattacaatagcaccatgaacacagtgttgcgctttctctgttctctctggctgcagccaggaaaggactcagaccaagaagaactgctggtgtgaggacgtgccgtgctggcctcatgcagtccttcctgcattcattagttgagcaatgcagaatctgtattgacgtgaagttcaagacaaaataaataaagatacatttgtaaattcaaaa

SEQ ID NO: 904 - protein, 64 aa, Homo sapiens
MRTVRSGPSEMPDPQRHCEMKESKTHLSITAIMPVRKLFLLHSYLELKDDVFGFNRSCSSHQGQ

SEQ ID NO: 905 - DNA, 756 bp, Homo sapiens
  misc_feature (1)..(163): wherein any n is one of a or t or g or c
ncctgcgtgtgccaccgctggttccagccggccatcccctcctggctgcagaagacgtacaacgaggccctggcgcgggtgcagcggnctgtgcagatggatgagctggtgcccctgggtgaactgaccaagcacagcacatcagcggtggatctatccactngctttgcccagatcagccacactgcccggcagctggactggccagacccagaggaggccttcatgattaccgtcaagtttgtggaggacacctgtcgcctggccctggtgtactgcagccttataaaggcccgggcccgcgagctctcttcaggccagaaggaccaaggccaggcagccaacatgctgtgtgtggtggtgaatgacatggagcagctgcggctggtgatcggcaagttgcccgcccagctggcatgggaggccctggagcagcgggtaggggccgtgctggagcaggggcagctgcagaacacgctgcatgcccagctgcagagcgcgctggccgggctgggccatgagatccgcactggcgtccgcaccctggccgagcagttggaggtgggcatcgccaagcacatccagaaactggtgggcgtcagggagtctgtcctgcctgaggatgccattctgcccctgatgaagttcctggaggtggagctttgctacatgaacaccaacttggtgcaggagaacttcagcagcctcctgaccctgctctggacccacacactcacagtgctggtggaggcggcc

SEQ ID NO: 906 - protein, 252 aa, Homo sapiens
  VARIANT (1): wherein Xaa may be any one of Ala or Pro or Ser or Thr
  VARIANT (30): wherein Xaa may be any one of Ala or Pro or Ser or Thr
  VARIANT (55): wherein Xaa may be any one of Arg or Cys or Gly or Ser
XCVCHRWFQPAIPSWLQKTYNEALARVQRXVQMDELVPLGELTKHSTSAVDLSTXFAQISHTARQLDWPDPEEAFMITVKFVEDTCRLALVYCSLIKARARELSSGQKDQGQAANMLCVVVNDMEQLRLVIGKLPAQLAWEALEQRVGAVLEQGQLQNTLHAQLQSALAGLGHEIRTGVRTLAEQLEVGIAKHIQKLVGVRESVLPEDAILPLMKFLEVELCYMNTNLVQENFSSLLTLLWTHTLTVLVEAA

SEQ ID NO: 907 - DNA, 393 bp, Homo sapiens
agaccctgaagaggaacaatgatgtcctgcaacctcaggcaaagggcttcagatctgacacagggaccccagaaccgcttgacccacagggttcactcagcctcagccaacgcacctcgcagcttgaccctccagccttgcaggcccctcgacctctgccgcagctcctggacgacccccatgaggtggaaaagtcgggtcggctcaacatgaccaagattgcccaaggggggcgcaagctcaggaagaactggggcccgtcttgggtggtgttaacgggtaacagcctggtgttctaccgagagccaccgccgacagcgccctccgcaggctggcgggtagccggcccgaaagtagcgtggacctgcgcggggcggccctggcgcacggccg

SEQ ID NO: 908 - protein, 64 aa, Homo sapiens
MMSCNLRQRASDLTQGPQNRLTHRVHSASANAPRSLTLQPCRPLDLCRSSWTTPMRWKSRVGST

SEQ ID NO: 909 - DNA, 439 bp, Homo sapiens
  misc_feature (1): wherein any n is one of a or t or g or c
ngcatgccgttgcccaggctggtctcaaacagctggctcaaacaatcctcccatcttggcctcttaaagcactgggattacatgagtgaggcaccacacctggccaagaatttccttaaagcctatgaagtggtgagcctttcatttcatgtggaaggttctggtggctgcaggatggcagtttggcacaggtccggagaggaagaggagggctccaaggtgtgctcaaggttccactgggacagtggtgtcctccccaaaccaatgaccaattagtgaggggtgcagtcatgcccgtgggccttcaacagcattttactgatcagagccgctctgccggcccgagggagctgagaaggggcttgggaatggggtcttgaggaggggctggccggaatgtgcagcactagcccagctggagcgggcggcgcgggcgcgc

SEQ ID NO: 910 - protein, 91 aa, Homo sapiens
  VARIANT (1): wherein Xaa may be any one of Arg or Cys or Gly or Ser
XMPLPRLVSNSWLKQSSHLGLLKHWDYMSEAPHLAKNFLKAYEVVSLSFHVEGSGGCRMAVWHRSGEEEEGSKVCSRFHWDSGVLPKPMTN

SEQ ID NO: 911 - DNA, 804 bp, Homo sapiens
gcttgccacttaaagttgctatttctgatgtccttggttcctaacagagggaagggggaatgctacagaattcctgaaagaaaaactgtttagaaagtctcccgcctttcactctcactgccagcatgtctgtgtctggaatgctgctaggagaggtagatccagtgcttcagttctgccactccctgaagtaacttagtgtaatagaagtccatgttgtctgcaaagtcagtacaaacaggtgactccatgtcaccgaaagtgcagtataatgcagttcctccaacactgaggaaaaccgttgctatgcacagcaagaccagcaaaatacaggagccacctccaacttcatcttgatccaagctatcgtctatttcttggaatctcactcttcgcttagatggtttgtgttgcatttgggcaggatgatctcctacagtatcattcctcttctttaatatggagaccaatccttcagtaggaacaacctctgcaatctctatccttttggcaagatcatcaagagaaagacagctctcatcagaaggcagattctcctggagactataggatgcttcttcaggagagagatcttgaaggagatcggagtcgtcgtcttggttatcttcataggaaagggaatcctcagtaacctttaaacaatccttcaaaaaggctgttcaaatagtcttctgtttctttgttgagttggtcgtctttatctcccttttcctctggggccatacacacctctggaagcagtatgcctaagtcagatatttgattatttccacagagcacatt

SEQ ID NO: 912 - protein, 89 aa, Homo sapiens [sequence omitted]

SEQ ID NO: 913 - DNA, 591 bp, Homo sapiens
  misc_feature (1)..(2): wherein any n is one of a or t or g or c
nnggtcgacgtgggtcagtctttctgtggcccacatgttgagagatcgggggggcttccagaaagaggctcctgcgcggtgaatgcgttgaaagcacatgattctagcagagggagcaagggtggccgcagcccagggaatcagggctgcccaggtgactgaagcaggaggggagtgaggccagatgggggttgggggagcccttggctctggacttagggaggcgagattgagccttttgtgaggttacaaattaaagctctgtctgtgtctctaagaagcctcttgactcccaaaggagaggacagtgaggaagatgaagataccgagtactttgatgccatggaagactccacatccttcatcaccgtgatcaccgaggccaaggaagacagcagaaaagctgaaggtagcaccgggacaagttccgtggactggagctcagcagacaatgtactagatggtgcctcgctcgtgcccaagggttcatccaaagtcaagaggcgagtccgcattcccaacaagcccaactacagccttaacctctggagcatcatgaagaactgcatcggccgggagctctccaggatc

SEQ ID NO: 914 - protein, 124 aa, Homo sapiens
GGEIEPFVRLQIKALSVSLRSLLTPKGEDSEEDEDTEYFDAMEDSTSFITVITEAKEDSRKAEGSTGTSSVDWSSADNVLDGASLVPKGSSKVKRRVRIPNKPNYSLNLWSIMKNCIGRELSRI

SEQ ID NO: 915 - DNA, 713 bp, Homo sapiens
tctgcatcagcttcaagtacattattttgtttccctttcctgtttgagccgcttatgccatttctcacagaggggaagaaatacgtagttgctttcattactcttattgcttctttgctgttggggtgtgtgaagtgagcattgattttagtgctgagaatgtaaacggacttacaggatgcttggattagtcatcacaggttcttatgactttgctaccacagttgatatatttctcctcaaacctgttgccctaaggaatatataaaatattgttgatatttctaggtggtgttatcaaggagaagaaattcctgccttgaccagatgtgtggagcatctacaaatgaatgaatagttatttacacacaaaccactgtgtacaaaagcgtccatggagctgtcagtgtctcgagtggtattatgaggcctcaggtgccttggggtacattgtcatgctataagggatgtatatcataaggtatggtggaagaggggccttatgtgaatgattgccacatactgtttctgttgctgctttttttccgattcctttttgtcattggatttgtttgttttgtcatgtggtgaatggtgttttagttattgtgttgctgccagaatcagaatccagttcttgttcttactgccttatagttattgtgttgccacctgaatcagaatccagttcttgttcatactgccttgtagtg

SEQ ID NO: 916 - protein, 55 aa, Homo sapiens
MIATYCFCCCFFSDSFLSLDLFVLSCGEWCFSYCVAARIRIQFLFLLPYSYCVAT

SEQ ID NO: 917 - DNA, 668 bp, Homo sapiens
ttttgaaggaggttcatttttaattaattaaagaagaggataaatactattttaaacaatacctggtggtatcttcttagcagtcccttttttgcttcttggacttctttttccaggaattttttttgtcctttcccaagaaggcctgttcatctctggaggcttcacaaagggtgttttgcgagttctcacctgcagccacctcgcagctcaatgtgcagctttcattattattgaggctgtcctgctcagacacttggggctttcccatcgcactgtcgctgctggtcagatgctcatgcccgtccccgtcaagctgattttcattttcatctgatgcagaaggcagacaggtcacactcctttccacgctgtcaccaggatgacatccatcttgtggttctatttgcagataatatgtaggagtatcgctgtcatccattagagcatcctttggtgaaccatttaaagttacattaaagaccttccatgtctgggaatcggaggcgcaaggagggctaccgctgggcgccgggtctgtttccagccccactcggcgacatggcggccgacgtgctgtcacggagcttgctcgggtctcccctggctccggtggaggagacacctctcgcctttccgccccgcctccctctgcgcacccctcgcga

SEQ ID NO: 918 - protein, 121 aa, Homo sapiens [sequence omitted]

SEQ ID NO: 919 - DNA, 532 bp, Homo sapiens
  misc_feature (297)..(527): wherein any n is one of a or t or g or c
ggcgggttctggagggaagagcgaggactggcctatctgtattctcatcagccgcctccatgcacacggaggtgcatttcattgttgttgatacacacgttccatccacaagaggcaactcagagggactgaagcaacttcacacctaccccaaagccatttctgccaccagagtcccccatctccaatcaccaaggaagtctccatcaagggtgagctccaggcatctcagttgtcatcagcagcatcgacattgtctgagaaatatttcttctgtccagttaaagcataatttantcaaacactannnagtagtaaaanagactncaacttttcctctnactatatttatatatanatcnctgagaaggtacctgtcaacttgaaattcnctatctncagntaatanacatcagggtcnagggagggatnccgagccccacccctgtgcacagcaggggctgggctgtcatggaggagagcaaaccggtctcccttccgagcaaagaggacgggtgggagaggcncagcc

SEQ ID NO: 920 - protein, 108 aa, Homo sapiens
  VARIANT (80): wherein Xaa may be any one of
  VARIANT (83): wherein Xaa may be any one of
  VARIANT (84): wherein Xaa may be any one of
  VARIANT (88): wherein Xaa may be any one of
  VARIANT (90): wherein Xaa may be any one of
  VARIANT (100): wherein Xaa may be any one of
MHTEVHFIVVDTHVPSTRGNSEGLKQLHTYPKAISATRVPHLQSPRKSPSRVSSRHLSCHQQHRHCLRNISSVQLKHNLXKHXXVVKXTXTFPLTIFIYXSLRRYLST

SEQ ID NO: 921 - DNA, 423 bp, Homo sapiens
gcgcgcctaggccccggcacagcttcggctgagcgccgcaaaagtcacgttattggcatgttctagaaactggctttccttgctcgttgtccactctgcgaggttgttttgcacatttgcttgtggccgcagaacgtccgctttcgctgttaggcagaagctcctgcgtggttggggcggttggctcctcggcgctctcctgcctggcggctccgtgacggccgccgagcagcctcggtccccaccctgcggctcgcaatggcctcgaccctcggagagcttgacccagacgttccctacctacatgagcggcgacgccctttcccggctcttcctcggctggggcgccccagggcttcggcgcgggcggccttccctcacttctgctcttctcccatccccggtaacaccgtccactcccag

SEQ ID NO: 922 - protein, 55 aa, Homo sapiens
MASTLGELDPDVPYLHERRRPFPALPRLGRPRASARAAFPHFCSSPIPGNTVHSQ

SEQ ID NO: 923 - DNA, 1140 bp, Homo sapiens
ttttgcatcagagaaagagtttaatgattacaggcttctgagtgaggagacaggagcaaaccttcaaattcatcattccagagagttctgggctacagtttttaaggggattgtggagggtgagaggctggaaaattggagaaattgatcagttggggtagggagatgaaatcatcaggatgtggaaactgcattttctggtgactcaccttctcatgggatcctgcagaacagctgacatgagtagttttactggcatgcaggacctggcagtgccttctctgcctttgtcctgccatcgcttctgcctaggatcccccagaaaaggatagtactggtttgcacaggagcagaagtggtgaaaatgggaaatgatgagtgtggatggagatgctcatggcagggtctgtaggtctctttgagggggctcaactcacaaagtgcagatttttattgaaatatgaatgcttgtagaaaggacattttcctactgagcaatggcagttccatatttcttatcagaaaggaagtaggcctcagtctgattgaacagtgaggagagggaggattcaacacttacaagttcacctgcattgcatttcccagaagaaagaagaaaatcaataacgcatttcaaagatcacggtgctagagacagagaaccacaatttaagcttttccctgggcttagaggcggatgtctcactgccaatttcacgtccaacaccggagcctcgcagtccatttttctccccagctgttttagaaatatccccaaatatcaaggacatctgaatgagtgaaccatcagaataaggagcgattcccacagagttccatcccacagggaagggacgggaccagcggggcaggcctgaagcctgggttgagcggcgctgtgcctttcattcttcaccgagatctcggacctagagtttccaggttccggagggatgcggttgttgaccgctagcctagaatccgtgagggctgaaccgggacgaaggcctaggacagagaggtggtgtggaaggacccagccgcggccactggaagagcagcttcctgcaatgtaaagtgttcgcgacctgcattgtttgctttcttcctggaggagccaatccgtcccattctggatcc

SEQ ID NO: 924 - protein, 65 aa, Homo sapiens
MAGQRQRRHCQVLHASKTTHVSCSAGSHEKVSHQKMQFPHPDDFISLPQLINFSNFPASHPPQSP

SEQ ID NO: 925 - DNA, 710 bp, Homo sapiens
ttagctgtgaagcaatctagtggctaagtgtgaaatcctgggtgcgcaggtgttctcactcccgccgtgttctcagtgcagtggtggtcagaggcccttccaaggagacatcactctgatcagttacagatagatgttctggaagatctgcaggtgagtagatccagcagagtttcttcccaccaactctagaagaaagggccttatcggagttgaccctgagcctttggtaaggttttgtgtgcatgcgattcagttatctttggcaattcttttcttgctgcagtgagagattaattggttgctgatcaaaccgttcatgcagatggggggacctttggattgtacggctttctcctcttggctgctttcttttcaggaagttggactttggccaggtttggctttcccagagccgttcctttctctgtcctttccttgggtcctcatggtgtgcccattggatccttggccttgtgatcctctgggaactgggggccagttccacttttgcagccttctgtgctggaagagaagcccagcgccctggaaggagcctctttaagtcccccatgtcgctttctctctctgctcttttagtgtctgagattgcctttctttgaatttcccagtgtttcttttccttgtcccttccctcaccaacctggagttattttggttgactatgtccctggcttggcttctcctgg

SEQ ID NO: 926 - protein, 105 aa, Homo sapiens
MGDLKRLLPGRWASLPAQKAAKVELAPSSQRITRPRIQWAHHEDPRKGQRKERLWESQTWPKSNFLKRKQPRGESRTIQRSPHLHERFDQQPINLSLQQEKNCQR

SEQ ID NO: 927 - DNA, 418 bp, Homo sapiens
catccgccactcgctgctgcgccgcgatgcgctgagcgccgccaaggaggtgttgtaccacctggacatctacttcagcagccagctgcagagcgcgccgctgcccatcgtggacaagggccccgtggagctgctggaggagttcgtgttccaggtgcccaaggagcgcagcgcgcagcccaagccctcaagggaacaaagccgatgacagccggatgagcttgttgggaaaactggtctccatggcggtggctgtgtgtcgaatcccggtgttggagtgtgctgcctcctggcttcagcggacgcccgtggtttactgtgtgaggttagccaaggcccttgtagatgactactgctgtttggtgccgggatccattcagacgctgaagcagatattcagtgccagcccgagattctg

SEQ ID NO: 928 - protein, 72 aa, Homo sapiens
HPPLAAAPRCAERRQGGVVPPGHLLQQPAAERAAAHRGQGPRGAAGGVRVPGAQGAQRAAQALKGTKPMTAG

SEQ ID NO: 929 - DNA, 735 bp, Homo sapiens
gtgaacacggaaggtacctgcaggatccaattgtgtccattgatctctcagagtggctgaggataatagagtttcttcttcaaggtctcaaggtctgaagcatcccacagaatgatcctactgaataactcccataagctgctggccctatacaaatccttggccaggagcatccctgagtccctgaaggtgtatggctctgtgtatcacatcaatcacgggaaccccttcaacatggaggtgctggtggattcctggcctgaatatcagatggttattatccggcctcaaaagcaggagatgactgatgacatggattcatacacaaacgtatatcgtatgttctccaaagagcctcaaaaatcagaagaagttttgaaaaattgtgagatcgtaaactggaaacagagactccaaatccaaggtcttcaagaaagtttaggtgaggggataagagtggctgcattttcaaagtcagtgaaggtagagcattcgagagcactcctctgtattacggaagatattctgaagctcaatgcctgcaataaaagcaagcttggaagtagggatgagataggccacccagatgatgaatttgagaggtacaaaaacaggtgcttatcatttataattgctattccttgtacttttttgtaattcacattaatcagttttggaataaagagaggatgaattcctttcttgtgatgaataaaggttgtcaatggtcaaaat

SEQ ID NO: 930 - protein, 181 aa, Homo sapiens
MILLNNSHKLLALYKSLARSIPESLKVYGSVYHINHGNPFNMEVLVDSWPEYQMVIIRPQKQEMTDDMDSYTNVYRMFSKEPQKSEEVLKNCEIVNWKQRLQIQGLQESLGEGIRVAAFSKSVKVEHSRALLCITEDILKLNACNKSKLGSRDEIGHPDDEFERYKNRCLSFIIAIPCTFL

SEQ ID NO: 931 - DNA, 833 bp, Homo sapiens
  misc_feature (544)..(574): wherein any n is one of a or t or g or c
gggctgttccagtttcttatctcaggagggaagagctgcagatgtctttactgtgaatgagggagagaaacgctaaagcacagaaatgttcagaaccaaagagctggatcactcatgcttctagaaaagacattggcatcttctcattgctcatctactgtgcctggcacagccttattttctagctttctgaatgtgagttccatccatatcctttgcataacggtggtactgggctgtggagagcttggaatgtgtgtccatggggaaatgggctgttctggttattataaaacggccaagggagggctccatggcacacctctgagtaacccaggacactcctgtttgggaaatgcaaaccatccatacggcaggggcacaattataaagattgatcctgtcacgggaatggtttcaaatctgaccaacctcatggcatacattggggaagcaattgtgaaaccccttgattctttggatctggacatgctgtactgtgacaatggtttgtgtgtgacagaaaatgtagctgtgtctaccngggaaagactggggaaatttcttcctgtgngagttctttataaagcaaaagtgcatgaaactgtcagtaatattgtagtctataaagggaaattgctcttagaggctaatattgcacaatgactactttttttgcttatttggaaaagatctttatctcttggagtattaagaagtcaacatataattgccaccctatacattgtgttctggagtgcctgatttattgaaatcagtgtgaaacctattttaaataaatatctatttcaaaaccaaaaaaaaaaaaaaaa

SEQ ID NO: 932 - protein, 183 aa, Homo sapiens
  VARIANT (144): wherein Xaa may be any one of Arg or Gly or Trp
  VARIANT (154): wherein Xaa may be any one of Arg or Gly
MLLEKTLASSHCSSTVPGTALFSSFLNVSSIHILCITVVLGCGELGMCVHGEMGCSGYYKTAKGGLHGTPLSNPGHSCLGNANHPYGRGTIIKIDPVTGMVSNLTNLMAYIGEAIVKPLDSLDLDMLYCDNGLCVTENVAVSTXERLGKFLPVXVLYKAKVHETVSNIVVYKGKLLLEANIAQ

SEQ ID NO: 933 - DNA, 592 bp, Homo sapiens
tgtacattcttggcaagaacctcattttaattaaactttaaaggacttataatattgtaattccacttatataactttataataataaaataaattattgttgatttgtgcaagtatatttacatcaatcaggtttcaaatggtaaaagagagatcactcaagtattacaactgagagaatttgatgaagattatttaaagcaggtgttttaatggtaaaaatgaacactgagctaacacaggatgacaacatcaggtagcagctacctgtctagggctgggaaacaatggaaaagattaaggttctcggaacctagaaactcacaagagtggccccagagagctacaattagacaagacagcggaggcaggggcagtgccaggatcatgctggtacctcaggtattcagagaagagctttgcggaactggaattcagatgctgtccagttgctaactgaactttcaggaaggcatgttgaagcacattgtgttcacctctgaaagtcgttactgtccagctggtgctagtagccagagtgggatcaatgtggagagttctgggagagctaacagaagcggtttcatattcc

SEQ ID NO: 934 - protein, 70 aa, Homo sapiens
MTTSGSSYLSRAGKQWKRLRFSEPRNSQEWPQRATIRQDSGGRGSARIMLVPQVFREELCGTGIQMLSSC

SEQ ID NO: 935 - DNA, 1422 bp, Homo sapiens
gatgtttctcatctcctttatacaattacaggctgcatttaagtagggcttatcgggaaaagtaaagacagccaattcaaccttccctcggctggtctattagctggttctcaaagcacaatcctgagtgtgaagcccaccttccagcctttctgattctgtagaataactcaaaaccagaggatgtgtaatcaaagctctggtgttacaacagatttcatcccaaatcgccgggctttgtcactacaggctcaggaaagagggaaggcaaaagtgattgccggaacaagacaacattttgaggagcaggaaaaaaaaaaagataaaaacacttgccactctacttacaaaagcttgctcttcctaaaagaattctgtgaggggaaggccaggattgaagcacagcagcattgctctttcccttccttcctccctggcccatatccagatactgagggctgcaacaagaagcctctttggtgggggcactaggatggaaagaagaggggatgagtacattccccaccctccctaaattgtttctacttctcctaaggccttccacagccatgtcaacagtctaagaatgattatactcttttgtgaaagaacgtcataaacttgtatttcagaaacaggaggggaacaggagaaagtgagtgatttaagaagccgtgtttgtgcccttctggccaggtgtactttttgggggacagcaaatagcccttgcttgaccccttcagtcagtagctacccagggtgtgggaggatatacatagaattctatgtgattatagcttctagtgcatatgtcaacaactatatacagggatctagaaatttaatgcatctctggccactgcaactaggttgacgtacctgagctccactacttttggtgccctcctcctttcgagagcttcagcttacttaaaaagagcccctacagctccatccttcccctgagtcttgggggaaagccccagtcacccctgcatgtaggatacaccagagcgagcggcgcagaagggtttggtgccgggatctccccacccctccccccatccccctacggctcagggccctggtgcagcacggtcctgggcagcaaacccccagccccccggcgaatcgtggtcccttggctgaagatctggctgcgggcctcccgctccggggccagccggcgatggtgggagtgtgaggggcgttcactctcgtgggggtcactcccgcgggctctccaccccatcctgctgcgaagtcctgcctctgggcttggggagaatggttcctggcggcccccagcgcggagggcttcaacgactcccgggcgccgccgccgtttcctcttcgtcctcgtccggcccccgaggccgctcgagcggcccggccggggggctgtccgcagggggctccgga

SEQ ID NO: 936 - protein, 91 aa, Homo sapiens
RSGCGPPAPGPAGDGGSVRGVHSRGGHSRGLSTPSCCEVLPLGLGRMVPGGPQRGGLQRLPGAAAVSSSSSSGPRGRSSGPAGGLSAGGSG

SEQ ID NO: 937 - DNA, 914 bp, Homo sapiens
  misc_feature (1)..(2): wherein any n is one of a or t or g or c
nntttttttttgaggggtaaaagcagctttattaatggattggagagcacagctgggatctgaggcctaagcaaggttcctttcttcttctgtgaagtgacggctgccgagcccactgggtggggcccaccgaacttacccacccagtcacagacggaggctggaacatggagagccaagtcttggctgagctcaccacgggcaggttctgctgggtctgtttactgcatggagactgactccaaaaggaggaggagcaggggaaatacaaagagcagcagtcccaggcccaccacaaggagcctggaaaaactcttgaccagtgggttcacccgaatatggccagtcagaatgtcatagctccacgacaaagcacggcgagcctccttcagctcctcttcttcagcaatcaaaaaggcgttttcatctgcttccagatcctcaaatgaatctgtgtcttctctttccaactcaagcctagaaggacagtcaaagagcatgtcaatctcatcgtcatccacaggggtggggagcaggctggcacttgggttgtacactagttcagagatggttaaaggttcttcttttattttatcttcctcttcactagggggatcttcatactcccgggctgccttcactggggagctggagatcaagggagcagaaatgttctcctctttaggcaatggaacaccagtgttacgagctgtgaccttggagccgagtctcagcagacgaacaaacacattactgttgcagtggttcaccatgtgcaattggaggcttcgtcgagtctggatcttgaccaagcattttgccatactggttattccaatccccttggtctcctcggcctgcatggcccagggcagcctttccctaacagtccattctgttttaaaggacctagg

SEQ ID NO: 938 - protein, 184 aa, Homo sapiens
LHDKARRASFSSSSSAIKKAFSSASRSSNESVSSLSNSSLEGQSKSMSISSSSTGVGSRLALGLYTSSEMVKGSSFILSSSSLGGSSYSRAAFTGELEIKGAEMFSSLGNGTPVLRAVTLEPSLSRRTNTLLLQWFTMCNWRLRRVWILTKHFAILVIPIPLVSSACMAQGSLSLTVHSVLKDL

SEQ ID NO: 939 - DNA, 676 bp, Homo sapiens
aaagttcatgttgttgatctaaaggcagaatctgtagctgctcctataactgttcgtgcttacttaaatcagacagttacagaattcaaacaactgatttcaaaggccatccatttacctgctgaaacaatgagaatagtgctggaacgctgctacaatgatttgcgtcttctcagtgtctccagtaaaaccctgaaagctgaaggattttttagaagtaacaaggtgtttgttgaaagctccgagactttggattaccagatggcctttgcagactctcatttatggaaactcctggatcggcatgcaaatacaatcagattatttgttttgctacctgaacaatccccagtatcttattccaaaaggacagcataccagaaagctggaggcgattctggtaatgtggatgatgactgtgaaagagtcaaaggacctgtaggaagcctaaagtctgtggaagctattctagaagaaagcactgaaaaactcaaaggcttgtcactgcagcaacagcaggatggagataatggggacagcagcaaaagtactgagacaagtgactttgaaaacatcgaatcacctctcaatgagagggactcttcagcatcagtggataatagagaacttgaacagcatattcagacttctgatccagaaaaattttcagtctgaa

SEQ ID NO: 940 - protein, 181 aa, Homo sapiens
MRIVLERCYNDLRLLSVSSKTLKAEGFFRSNKVFVESSETLDYQMAFADSHLWKLLDRHANTIRLFVLLPEQSPVSYSKRTAYQKAGGDSGNVDDDCERVKGPVGSLKSVEAILEESTEKLKGLSLQQQQDGDNGDSSKSTETSDFENIESPLNERDSSASVDNRELEQHIQTSDPEKFSV

SEQ ID NO: 941 - DNA, 1366 bp, Homo sapiens
  misc_feature (1): wherein any n is one of a or t or g or c
ntcctttccactagaagcgaggtgtgtactgcgtgcatgtttgctgagcgctcaccacgggctaggctccatgcccagttcctgtgaggagaaaacacgtttctatgtgcccggcaggtaggaggcactcacaaaatgttactttgtctttacagaattttctgaaggagagataaaaactgagttaaataaagatgatcagaatggatgagaaataactttagacattatttcattgaaccttcccaactgaaattattttatgatgttataacatggatagtaactcaagtagcaataagttacacagttgtgccatttgtgcttctttctataaaaccatcactcacgttttacagctcctggtattattgcctgcacattcttggtatcttagtattattgttgttgccagtgaaaaaaaactcaaagaagaaagaatacacatgaaaacattcagctctcacaatccaaaaagtttgatgaaggagaaaattctttgggacagaacagtttttctacaacaaacaatgtttgcaatcagaatcaagaaatagcctcgagacattcatcactaaagcagtgatcgggaaggctctgagggctgtttttttttttttgatgttaacagaaaccaatcttagcaccttttcaaggggtttgagtttgttggaaaagcagttaactggggggaaatggacagttatagataaggaatttcctgtacaccagattggaaatggagtgaaacaagccctcccatgccatgtccccgtgggccacgccttatgtaagaatatttccatatttcagtgggcactcccaacctcagcacttgtccgtagggtcacacgcgtgccctgttgctgaatgtatgttgcgtatcccaaggcactgaagaggtggaaaaataatcgtgtcaatctggatgatagagagaaattaacttttccaaatgaatgtcttgccttaaaccctctatttcctaaaatattgttcctaaatggtattttcaagtgtaatattgtgagaacgctactgcagtagttgatgttgtgtgctgtaaaggattttaggaggaatttgaaacaggatatttaagagtgtggatatttttaaaatgcaataaacatctcagtatttgaagggttttcttaaagtatgtcaaatgactacaatccatagtgaaactgtaaacagtaatggacgccaaattataggtagctgattttgctggagagtttaattaccttgtgcagtcaaagagcgcttccagaaggaatctcttaaaacataatgagaggtttggtaatgtgatattttaagcttattctttttcttaaaagagagaggtgacgaaggaagg

SEQ ID NO: 942 - protein, 80 aa, Homo sapiens
MRNNFRHYFIEPSQLKLFYDVITWIVTQVAISYTVVPFVLLSIKPSLTFYSSWYYCLHILGILVLLLLPVKKNSKKKEYT

SEQ ID NO: 943 - DNA, 642 bp, Homo sapiens
  misc_feature (1)..(82): wherein any n is one of a or t or g or c
ncgatgtcggaagaaacccgacagagcaaattggccgcagcgaagaaaaagttgagagaatatcagcagaggaatagccctngtgttcctacaggagcgaaaaagaagaagaaaataaaaaatggcagtaaccctgagacaaccacttctggtggttgccactcacctgaggatattcaggacattctgaaggtgctggtgtccgaccttaaccgttccaatggggtagcgctccccccattggacaagtggaagacacccaaggacaatgctgctactctacaaccatctgatgacaccgtgttacctggcggtgtcccttcccctggtgccagtctcactagcatggcggcatctcagaatcatgatgctgacaatgtccctaatctcatggatgaaaccaagactttctcatcaaccgagagcctgcgacaactctcccaacagctcaatggtcttgtttgtgagtctgcgacatgtgtcaatggggagggccctgcatcgtctgctaacctgaaggatctggagagccggtaccaacagctagcggtagccctggactccagctatgtaacaaacaaacaactcaatatcacgatagagaaattgaaacaacagaaccaagaaattacggatcagttg

SEQ ID NO: 944 - protein, 214 aa, Homo sapiens
  VARIANT (1): wherein Xaa may be any one of Ala or Pro or Ser or Thr
  VARIANT (28): wherein Xaa may be any one of Arg or Cys or Gly or Ser
XMSEETRQSKLAAAKKKLREYQQRNSPXVPTGAKKKKKIKNGSNPETTTSGGCHSPEDIQDILKVLVSDLNRSNGVALPPLDKWKTPKDNAATLQPSDDTVLPGGVPSPGASLTSMAASQNHDADNVPNLMDETKTFSSTESLRQLSQQLNGLVCESATCVNGEGPASSANLKDLESRYQQLAVALDSSYVTNKQLNITIEKLKQQNQEITDQL

SEQ ID NO: 945 - DNA, 1084 bp, Homo sapiens
tagcaggagattggatttttatttataggtccacataaagcttcaaggaaataaccagcattagtacctcctcacctgaaaaaggcttaagtaaacactaattaaaacatttaggatcttagttgtatcaatacttctgtacctgaaagctcttttaaatgtaagggttttctttttattgttttatttacctaggattctaagaaactgagaagtcatagctttcccttaaattatacatcatacatacattgtaagaatatagaaaattaaataaatcaaataattaaatattaagttaaatgcatgactacatatattaaatttggaaattcaaagcattaatagaacagagaaaccagctaaaacaaattgtagcttttaaaataaacaataaagcccgttatttattatctaaaagccagtaaatacatttacttctttggtacccattaaaatagttgcatttgcagaggatgtttagggcagcgaaactatactatattataatgatgcatacatatcatcatatatttgtcctctagcatgtataacaccaagaggggactctaatgtaaaccatgaactttggatgataatgatgtttcagagtaggttcattgattgtaacaaatgtaccattgtggtgcaggatactgatagcctgggaggctgttgagggctttgtcaggggagaaaggaaatctctatcttcctctcaatttttctgttaacctacaactgctctaaaaaaaaaagtctatttttaaaaacaatttttaaaagttgtattcgtctcagattcaaaatattatcacacaggtgatttatcttaaaaatccatgtgagtactgacctatatgtcattttttgcaaatctaaaacaaaaatatttcaaaatgttcagtggcagagagtactggtaccacaaaatcagagcagtagaagcaaaggggatataagatgtggacattttgtagcttgaggagatggcacctagggaaaagagaattaagtgtttatttgggaaaatgttaatgatatacacagaacataggagctggaataaagaaggcatgcttag

SEQ ID NO: 946 - protein, 73 aa, Homo sapiens
MPSLFQLLCSVYIINIFPNKHLILFSLGAISSSYKMSTSYIPFASTALILWYQYSLPLNILKYFCFRFAKNDI

SEQ ID NO: 947 - DNA, 372 bp, Homo sapiens
agatctttatgtctgagtccttcagaagcttcacaggtgaaggatgaggatttttcacagaatctcagtctggattcttctacacttctctttactcacatacctgcaatttttttcgttcttcgccttgtgtatgaggagcttaagttgaatactctaatgggagaaggaatttgttcactcttgaacttctcgttcagttggcaaggtcaaacaggatttatgcatcatccatcattttttacgtctgagccaccaagtatttatcagtgggtgagttcttgtctgaagggcgaaggaatgccgccttatccttacctccctggaatctgtgaaagaagcagacttgtagtcttgagtattgcactgtac

SEQ ID NO: 948 - protein, 124 aa, Homo sapiens
RSLCLSPSEASQVKDEDFSQNLSLDSSTLLFTHIPAIFFVLRLVYEELKLNTLMGEGICSLLNFSFSWQGQTGFMHHPSFFTSEPPSIYQWVSSCLKGEGMPPYPYLPGICERSRLVVLSIALY

SEQ ID NO: 949 - DNA, 569 bp, Homo sapiens
ggatcccacagctgcagtttgggaagcctccaggcctggagcatggagaggagaagaggaagggtcaggaaagtctggtgatgacccaaagagttcaagctgaggtttctcagagggcaccgttgtgggctcttccgatgacaccctgcctgtcacctgcagcttcctcatgtagccttggatctccttcctggtgggtgctcctgacatctccttcagcctccaagcctttcgcagtccacttccagcttcctgccatgcatccctccacctccagcaggccttttggatgggatctacaaccacccatgctgggtgcctcacatctgtgcagcccaacatctggcccacggaagccatccacttccttcaccccaacaaagtcatggagcctgggggcccccacaaggtcacctctcctccattccaccatcaggacagcttgccgcctgctgtctctacccaatacagctctcagactgaatccaactcagctgctacatctcccagactgcaggggccacaaccatctttccaagttgtgaccctatctcaagcctctccctagg

SEQ ID NO: 950 - protein, 154 aa, Homo sapiens
MTQRVQAEVSQRAPLWALPMTPCLSPAASSCSLGSPSWWVLLTSPSASKPFAVHFQLPAMHPSTSSRPFGWDLQPPMLGASHLCSPTSGPRKPSTSFTPTKSWSLGAPTRSPLLHSTIRTACRLLSLPNTALRLNPTQLLHLPDCRGHNHLSKL

SEQ ID NO: 951 - DNA, 444 bp, Homo sapiens
cctaggaccaaggacactggcagacttccagaagggcccccaaagccctaacctgtccagccagagcatgcgtctcagcagagctgtcttcccaagcctttgatgacaaaccaatttccctcgatgatgtgcttctgagtgctctgctgaggaacaatgggaagtctgcccagcagaagaaaatctctgccaagcccaagcttgagttcctctgtccaaggccagggacctgtgaccatggaagcagagagaagcaaggccacagccgtggccctgggcagtttcccggcaggtggcccggccgagctgtcgctgagactcggggagccattgaccatcgtctctgagtggctgtatgagggcctgagcagggagaaagcagaggaactgctgttgttacctgggaaccctggaggggccttcctcatccgggagagccagacc

SEQ ID NO: 952 - protein, 96 aa, Homo sapiens
MGSLPSRRKSLPSPSLSSSVQGQGPVTMEAERSKATAVALGSFPAGGPAELSLRLGEPLTIVSEWLYEGLSREKAEELLLLPGNPGGAFLIRESQT

SEQ ID NO: 953 - DNA, 763 bp, Homo sapiens
ctatggagcatggggcagctgatccatccctggtgtacaaactgctgactgcagacagatgctgagctacccaaaccaacacctagcctctccctgaagatcctcccaggctgagagagttctggatgtcctaggaccaaggacactggcagacttccagaagggcccccaaagccctaacctgtccagccagagcatgcgtctcagcagagctgtcttcccaagcctttgatgacaaaccaatttccctcgatgatgtgcttctgagtgctctgctgaggaacaatgggaagtctgcccagcagaagaaaatctctgccaagcccaagcttgagttcctctgtccaaggccagggacctgtgaccatggaagcagagagaagcaaggccacagccgtggccctgggcagtttcccggcaggtggcccggccgagctgtcgctgagactcggggagccattgaccatcgtctctgaggatggagactggtggacggtgctgtctgaagtctcaggcagagagtataacatccccagcgtccacgtggccaaagtctcccatgggtggctgtatgagggcctgagcagggagaaagcagaggaactgctgttgttacctgggaaccctggaggggccttcctcatccgggagagccagaccaggagaggctcttactctctgtcagtccgcctcagccgccctgcatcctgggaccggatcagacactacaggatccactgccttgacaatggctggctgtaca

SEQ ID NO: 954 - protein, 159 aa, Homo sapiens
MGSLPSRRKSLPSPSLSSSVQGQGPVTMEAERSKATAVALGSFPAGGPAELSLRLGEPLTIVSEDGDWWTVLSEVSGREYNIPSVHVAKVSHGWLYEGLSREKAEELLLLPGNPGGAFLIRESQTRRGSYSLSVRLSRPASWDRIRHYRIHCLDNGWLY

SEQ ID NO: 955 - DNA, 424 bp, Homo sapiens
  misc_feature (1)..(423): wherein any n is one of a or t or g or c
ncctaggcaggcagatcgcttgagtttaggagttcaagaccagtatgggcaacatggtgaaatcctgtttctacaaaaaacacaaaatttagccaggcatggtggggcacccctgtagtcccagctcccccagaagctgaggtggaaagatcacttgggcccatgaggtcacggctgcgttcaactatgcgcatgccacagcactccagccggggtgacagcatgagaccctgccatagaatactatgcagccttaaaaaatgaagaaaattatgtcctttgcagcgatgtggatgcagctagaggccaatatcctggctctttgctggaagctgatatatcttaatggacgtacaagaagtgaatgcaaagatcacaatattcacaccccacacttattaagggtcgacgtgtttctccttng

SEQ ID NO: 956 - protein, 67 aa, Homo sapiens
NPVSTKNTKFSQAWWGTPVVPAPPEAEVERSLGPMRSRLRSTMRMPQHSSRGDSMRPCHRILCSLKK

SEQ ID NO: 957 - DNA, 359 bp, Homo sapiens
ggatcctaagctttggaattatactctctacctacaggatgtttcctacatcatgtgacactctgtgttcatatgctggtgttctctcttctgagtgtgggaactccaaagagaaaaatattgttcctcctcttccttggatggtgaaacggcttctagctttcgtcactcctgctggtgacaaccacgggttcgttccagaagccattactgagcacttgctatgttctgagtcagctaatatttaagcttcgttcttgcccctgagtggggtgcatgccacgctgccacctcatgagtgagcctggcccagtatgtgttgccaagtgagatcatctgtccttcggggaggctgtctg

SEQ ID NO: 958 - protein, 69 aa, Homo sapiens
MFPTSCDTLCSYAGVLSSECGNSKEKNIVPPLPWMVKRLLAFVTPAGDNHGFVPEAITEHLLCSESANI

SEQ ID NO: 959 - DNA, 381 bp, Homo sapiens
agatctagaggctgggaagtccaagatcaaggtgttggcagatttggtatctggtgaggaactcttccaggctcaaagatagctgtcttctcactgtgttcttggtggtggaaggggtgagggaactctctgaagtttcttttggaagggaactaatcccattcatgaagcttctgcccccatgacctaatcactcatcaaagggcccacctccagtacctcacattgggggttaggatttcaacagatgaatttcaggaggacacaggccttcagtctatggctaggatcattccccagcatttctgttaagctgcagaagataattaacacctagacctgcctggagtgggcactaatgaagctcagcgggaagggttt

SEQ ID NO: 960 - protein, 53 aa, Homo sapiens
MNGISSLPKETSESSLTPSTTKNTVRRQLSLSLEEFLTRYQICQHLDLGLPSL

SEQ ID NO: 961 - DNA, 365 bp, Homo sapiens
  misc_feature (34): wherein any n is one of a or t or g or c
agatctttaagcaaacataataaaaatgagagtntacccttcttgcatatacttaagcacaaccaggaaatggtcgttttaattttttcactcctgaaaagggttaaaagaaactcacaaattttataattcacagaaatgtgggcacttaccatttctgtaattcacaaaacaagtgcattatttggcatacatggtgtttaaggctaaaatcataaaatactcactaattagcttaaaagtgtaaattacatcttagaatctgtctaggcaacaggagaatttggatttgctttatttaagattatcatgaagtccacaactttgatatttaaatacagccttcataatgaatcttttctaga

SEQ ID NO: 962 - protein, 51 aa, Homo sapiens
  VARIANT (41): wherein Xaa may be any one of Arg or Ile or Lys or Thr
MVSAHISVNYKICEFLLTLFRSEKIKTTISWLCLSICKKGXLSFLLCLLKD

SEQ ID NO: 963 - DNA, 339 bp, Homo sapiens
gatctggctggatgcagtacagcttgtgcatctttgcttactgcagtgtccagacagttacaggacaggctaacaccaatggaggctttacttcagacaagatatggattatatagctcaccatttgatccagtcctctttgatttggagatgagtggctcttcttgtaaaaatgtttataacagcagcattggtgtccagtcagatgaaattgatttatcagatgtcctttcaggaaatggaaaggtcagtagttgcacagctgctgagggtagtttcacatctctcactggacttttggaagttgaacctctgcactttacttgtgtgtcaactagt

SEQ ID NO: 964 - protein, 113 aa, Homo sapiens
DLAGCSTACASLLTAVSRQLQDRLTPMEALLQTRYGLYSSPFDPVLFDLEMSGSSCKNVYNSSIGVQSDEIDLSDVLSGNGKVSSCTAAEGSFTSLTGLLEVEPLHFTCVSTS

SEQ ID NO: 965 - DNA, 358 bp, Homo sapiens
actagtaaccctgatgctcctgtgtgctaagttgtgtctataggcatttacagatttggagaaacattcaagcctaaaattgaggccacacagtgagcagtatgatagcttaaaacaatttttttaaataaaaaaccatgggcgcctgagaccctgatgggctgtgaccatgaaatcttgggcaggtgctctgagcctcctctagggctcatctgcaaaacaggggccataataacacctacttcatcaggtcattgagacatgtaaaggaatgatttataagaaggaacttaacgaaaaaactgtaaagcaactgtgcgggtatcattatattacagcctttattattggggaaggc

SEQ ID NO: 966 - protein, 60 aa, Homo sapiens [sequence omitted]

SEQ ID NO: 967 - DNA, 217 bp, Homo sapiens
  misc_feature (1): wherein any n is one of a or t or g or c
nctcgagtctatatctttgactatggacaatattctgctgatttttcaggcccaatgatgatcattactcagaagatcgctagtttggcttgcgaaattcatgatgggatgtttcggaaggatgaagaactgacttcctcacagagggatttagctgtaaggcgcatgccaagcttactggagtatttgagttacaactgtaacttcatggggatcc

SEQ ID NO: 968 - protein, 72 aa, Homo sapiens
  VARIANT (1): wherein Xaa may be any one of Ala or Pro or Ser or Thr
XRVYIFDYGQYSADFSGPMMIITQKIASLACEIHDGMFRKDEELTSSQRDLAVRRMPSLLEYLSYNCNFMGI

SEQ ID NO: 969 - DNA, 431 bp, Homo sapiens
  misc_feature (1)..(431): wherein any n is one of a or t or g or c
nnacgcgtggattctggcagccgccgagggccgctatgaggtgctgcgggagctgctggaggctgagccggagctgctgctgaggggcgacccgatcaccggctactcggttctgcactggctggccaagcacgggcgccacgaggagctcattctggtacacgacttcgccctacgccgggggctgaggctcgacgtgagcgccccaggcagcggcggcctcacgcccctccacctggcggcccttcagggccacgacatggtcatcaaggtgctggtgggcgccctgggtgctgacgctacgcgccgcgaccacagcggccaccgggcctgccactacctgcggcccgacgcgccttggaggttgcgggagctgtcgggagccgaggaatgggagatggagagcggcagcgggtgcagtcggagagagn

SEQ ID NO: 970 - protein, 76 aa, Homo sapiens
AGAAAEGRPDHRLLGSALAGQARAPRGAHSGTRLRPTPGAEARRERPRQRRPHAPPPGGPSGPRHGHQGAGGRPGC

SEQ ID NO: 971 - DNA, 407 bp, Homo sapiens
  misc_feature (407): wherein any n is one of a or t or g or c
acgcgtggcctgctcactccatgaagcgggccgccaggtcaaggcccttggagcagacctctgaggagaaggtaagatgtcgtctagaaactcagcagcagcacactattttgggctgggagcttggtctgggatggattggattttcctgaggtctcatttttccttgagtagaaggtgtgccccagagcaagcaatttgacttgggcacagatgaccaagtgcctggatttctgggaatgacaaccggagcatcacaacaggttaatgacaatgacataggaagaggctccaggagcaaaccttggggggtttggcttcaggagtgagttctgtctggcctcccccgctctgttgcagggctgcaccatagttgaagaatgtcgggggccaagctgctcccctgn

SEQ ID NO: 972 - protein, 62 aa, Homo sapiens
MSLSLTCCDAPVVIPRNPGTWSSVPKSNCLLWGTPSTQGKMRPQENPIHPRPSSQPKIVCCC

SEQ ID NO: 973 - DNA, 428 bp, Homo sapiens
  misc_feature (299)..(396): wherein any n is one of a or t or g or c
gtgcactcaggtgactcacacctgagtgtttgcaactccgggtaccataaacccagtgggccaccctctgtgtgactcatgccccctcctgcccaagttctcccggggccacccctgccctggaggagtgcccaacacagcagctgtcatggccgatctcctgggaaacccacctggcagagcccagcccagggagccccacgggatgctctggttctcctcagcactctctctggccgatcaggttcaaggacagctctcagtcttacccgggagaagaaactggggcacctcctgtnttctccgctctgcgtctcagcagggtttgcaataagcagtgaattcctgttgacgagtttggaggggactttcctagttcatagagtccacggtttntaaaagatcactgctgtctagttctccggtct

SEQ ID NO: 974 - protein, 106 aa, Homo sapiens
  VARIANT (74): wherein Xaa may be any one of Cys or Phe or Ser or Tyr
  VARIANT (106): wherein Xaa may be any one of Leu or Phe
MPPPAQVLPGPPLPWRSAQHSSCHGRSPGKPTWQSPAQGAPRDALVLLSTLSGRSGSRTALSLTREKKLGHLLXSPLCVSAGFAISSEFLLTSLEGTFLVHRVHGX

SEQ ID NO: 975 - DNA, 313 bp, Homo sapiens
ccatggggttggcagcagctggaggagatgcttcttcccctgtcctcagccagagccttctctgtccctggcttgggtggcttgggcgagtcctgttcagccaggactaccctgcagatggttgtatgtgtctgagaggtgggcaaaggcaacctgggtaagcccactccaggacactccctgccagccccggagtggaccaggctgcagaaccccacatccctgtcccggacagagtcagcccagggcaggattcttggccactggtctggcttgagtgccttggttgttaggggctggtagtacagctagc

SEQ ID NO: 976 - protein, 52 aa, Homo sapiens
MGLAAAGGDASSPVLSQSLLCPWLGWLGRVLFSQDYPADGCMCLRGGQRQPG

SEQ ID NO: 977 - DNA, 279 bp, Homo sapiens
  misc_feature (1)..(2): wherein any n is one of a or t or g or c
nntcggcatcacgggccgtaggggtctgcggccccgggctgcgccctaccccccggccaggctctggagggaccctggaactgccgccggcctcagcctatggcccggaggtacgatgagctgccgcactacccaagcatcgcggatggccccgcagccctggctggcttcccagaggcagtgcccgcggcaccagggccctatggccctcaccggcctccccagcccctacccccaggcttggacagcgacggcctgaagagggacaaggatgagatc

SEQ ID NO: 978 - protein, 60 aa, Homo sapiens
MARRYDELPHYPSIADGPAALAGFPEAVPAAPGPYGPHRPPQPLPPGLDSDGLKRDKDEI

SEQ ID NO: 979 - DNA, 742 bp, Homo sapiens
gtcacagtgaccttttattaaatgcagagacaattatgtgtcacatgaaacatcaacaaaagcccagttctggtagccagcaagatttttttgccacatttatacttggtcctctttaattatacagagttgcccccagagtactgaaatgatagactagaacacgatgacttcagcaggggatcagagctttagagcttcatcattcatgtgagccaagtgcgaaatttcagcctgtctctcctctaaatgcagttaggagtcttcgaaaccttttgtgtgaatccaggagggaaaattgtctggcaaagtctgataagcatcgtgtcaagagcacatttgtactctggtaagaagcccaggccaattgctgctgggttgtcatggcaacagaaatacacaccatttacacatcagcttctgaaatgagcacaaaataacaaaaccttttcgacaggatgggaggtgaagggaagagcagcagcatctgtgcagcctggtgaaacggtgtttacgacagtctacacggcactactgggtatgctgtctccttggattgtgtcatatttttaacccagtgggaaattcataggatcctcttgactctgtaaaaactccttgtgtagaattgtcaacccaggatggtggcagacaggagagccctccttcgaagtcccacagccccaaccacagcccagggcatcgtctgtgggattcagactgctgcttgaccaggtcccct

SEQ ID NO: 980 - protein, 59 aa, Homo sapiens
MQLGVFETFCVNPGGKIVWQSLISIVSRAHLYSGKKPRPIAAGLSWQQKYTPFTHQLLK

SEQ ID NO: 981 - DNA, 346 bp, Homo sapiens
gtcgacgacttcagtgatcgagagcacctgaagaagcctcttgaagactacatggcccttttccccagtgtgaggattcttcgaaccaagaaacgggaagggctgataaggacccgaatgctgggggcctcagtggcaactggggatgtcatcacattcttggattcacactgtgaagccaatgtcaactggcttccccccttgcttgaccgcattgctcggaaccgcaagaccattgtgtgcccgatgattgatgtaattgaccatgacgactttcggtacgagacacaggcaggggatgccatgcggggagcctttgactgggagatgtactacaagcggatcc

SEQ ID NO: 982 - protein, 115 aa, Homo sapiens
VDDFSDREHLKKPLEDYMALFPSVRILRTKKREGLIRTRMLGASVATGDVITFLDSHCEANVNWLPPLLDRIARNRKTIVCPMIDVIDHDDFRYETQAGDAMRGAFDWEMYYKRI

SEQ ID NO: 983 - DNA, 378 bp, Homo sapiens
gctagccgggacatcagtaagaccagcctggacaactactcagacaccaccagctacgtgagcagtgtagcgtccaccagctcagacaggatcccctctgcttatcctgctggcctgtcttccgataggcataaaaagagggctggccagaacgccttaaaattcatccgccagtacccctttgcccacccagccatctactccctgctcagtgggaggacacttgtggtcctgggggaagatgaggccatagtcaggaaactcgtgactgcactggctatctttgtccccagctatggctgctacgctaagcccgtgaaacattgggcctcctcccctttgcacattatggattttcagaagtggaagcttattggc

SEQ ID NO: 984 - protein, 55 aa, Homo sapiens [sequence omitted]

SEQ ID NO: 985 - DNA, 367 bp, Homo sapiens
ggtaccccaaactcaacatgacccaaactaaatgtatcaccctcatcaactttcttctgccaccaccactgagttcctcaagccagaaatgtatgagtcatgcttgaattcttctttcccctcattctccacattacatttgtcacaaagtttagccacttcctccgcatgactatggtcacttctcttcatcttcactgtcactattatagttcagaccaacatcacctctcacctggattcttgcaatagcttcctaacagatcccctacagccattatcatcttcctccagtgtgattaaaactcatcctgtcacccctctgcttcaacctatcctggtctgtaattttcaactgtgtcaacag

SEQ ID NO: 986 - protein, 50 aa, Homo sapiens
MLEFFFPLILHITFVTKFSHFLRMTMVTSLHLHCHYYSSDQHHLSPGFLQ

SEQ ID NO: 987 - DNA, 281 bp, Homo sapiens
taccccaggacaggcagcaagaatcccaagattgccttgaaactggctgagttccagactgacagccagggcaagatcgtctcgacccaggagaaggagctggtgcagcccttcagctcgctgttcccgaaggtggagtacatcgccagggccgggtggacccgggatggcaaatacgcctgggccatgttcctggaccggccccagcagtggctccagctcgtcctcctccccccggccctgttcatcccgagcacagagaatgaggagcagcggctagc

SEQ ID NO: 988 - protein, 93 aa, Homo sapiens
YPRTGSKNPKIALKLAEFQTDSQGKIVSTQEKELVQPFSSLFPKVEYIARAGWTRDGKYAWAMFLDRPQQWLQLVLLPPALFIPSTENEEQRL

SEQ ID NO: 989 - DNA, 351 bp, Homo sapiens
  misc_feature (351): wherein any n is one of a or t or g or c
ggcgccgggccccctgtccgcgccccctgtcacttcgcctctccgccccgcccacgctcccgccgggtctccccgtgagtgtcccgtgtcctgccagcctcgggacgccccgcgagctcagggctgcgcagggactgtggtaattgagcgcggcgaagccttccgttcctgcctcctgtcgctcctgctggctccgaatgcagactgcgaacccggggacgcagttgtccatttcctttgaccttggggacccaggaaggtgcactgcccgcgggggtggggagggagcgagaggaatccgaccctgtctcagcccacagcctccgaggtctccaagtaaagggaaggatn

SEQ ID NO: 990 - protein, 77 aa, Homo sapiens
MDNCVPGFAVCIRSQQERQEAGTEGFAALNYHSPCAALSSRGVPRLAGHGTLTGRPGGSVGGAERRSDRGRGQGARR

SEQ ID NO: 991 - DNA, 414 bp, Homo sapiens
  misc_feature (255)..(386): wherein any n is one of a or t or g or c
ggatccctctgccattctcccatgagcagacatccccaggatgagctgaggggaatgcaatgagcaggccaaactctttccaagctgtttgaccacacccacctaccccagcactctcagcccctgcctggtgccctgtgctgagctgggtgaggctggggagactggtgagtgagggctgccctgccctttttgagcccccagtcttctggtgaaggaacatagcaacatggagtgattggtatggatgatgcnaaaccagggacatgggacccagaagtgcccgagccagcctggaaggcctctgccctgggccccgggtggctgtntgctgcacagctctccccacagcctgccccanataaacagcttatcttcgtccctnnaaaatgtgctctcgatttcgagagaggc

SEQ ID NO: 992 - protein, 89 aa, Homo sapiens
  VARIANT (5): wherein Xaa may be any one of Leu or Ser or Trp
MSLVXHHPYQSLHVAMFLHQKTGGSKRAGQPSLTSLPSLTQLSTGHQAGAESAGVGGCGQTAWKEFGLLIAFPSAHPGDVCSWENGRGI

SEQ ID NO: 993 - DNA, 318 bp, Homo sapiens
ggatccgtctggagcccatattatagaggttgaataaagaggccagtatgtggtccagccacggtaccatgtcatccacagtgtgcatggaggaggatggggtctccacagattccttccatcccaaatggagggtgccctcagacagagaggcagacagacagacagacactggccgaacggctccctgatggaacaccaggaggaggcagcatggtctcgtttccacatctgtagcctctgccctcctgcttccacgctccacacacgccagtctttgagtcgcctcccatgccatgatacctcccttggatacga

SEQ ID NO: 994 - protein, 99 aa, Homo sapiens
MAWEATQRLACVERGSRRAEATDVETRPCCLLLVFHQGAVRPVSVCLSASLSEGTLHLGWKESVETPSSSMHTVDDMVPWLDHILASLFNLYNMGSRRI

SEQ ID NO: 995 - DNA, 357 bp, Homo sapiens
  misc_feature (357): wherein any n is one of a or t or g or c
agatctgactctccccgttgggattaggctcttgttgtgcacagcagctgcttggttaagtactctttattagaggccttccctgccctgtcccactcccccaccttttttccggtgttcatataacacgcaaatccctgactcatagtcagtttctctagaggaatccaaattaaagcatcccccattttccacttcctactccatgaggcgcatccttgccctatcctcaccctctcctctccatccagagacacttcaggacacccatcccctgacatgctcatgtctgactctcatcccccctggccctaattctagcaactctcattgccccctaccctcatctctgcagcn

SEQ ID NO: 996 - protein, 87 aa, Homo sapiens
MSMSGDGCPEVSLDGEERVRIGQGCASWSRKWKMGDALIWIPLEKLTMSQGFACYMNTGKKVGEWDRAGKASNKEYLTKQLLCTTRA

SEQ ID NO: 997 - DNA, 378 bp, Homo sapiens
gggcccttccgaggcactctctggtgtctgcccaagctcagacaagatgcatagcctggtgcctgccaggccaacgggggtgactacttatccagcagataagtgtgtgtgagcagctctggggacatggggcaataaggggaggtctcatgtgtcaggggcagccaggaaatgttctgttaagatgtcctttctgttcctgagattttctagcaccagcagacaccgtggccaccacccctctctccctaccccatactgcagacgttgggagtctgcggccatgtaggatgcagcccacagctttgtccccaacattcatgaaggaatgcatggtgtgtcactgccattctgagatgggagttcagcaggactagt

SEQ ID NO: 998 - protein, 59 aa, Homo sapiens
MHSFMNVGDKAVGCILHGRRLPTSAVWGRERGVVATVSAGARKSQEQKGHLNRTFPGCP

SEQ ID NO: 999 - DNA, 361 bp, Homo sapiens
ccatggatatagttaatcataatgtgtcaatattggtttatcaattgtaacaagtgcacactaatgcaagatgtgaataatgggaaaacctgagtgtcaggttatctgggaacatgacatttgctatgcatttttctctaaacccataacttctctaacaaaatattttttaaaaaatcaaacatacaacatgtataaacacatgctaatatgttttattttctatatgatgtaagcagagtctggcatcctgggtgtgaagttagaaggaaactgagaattgagctgaatgccaggccccatgatcctggtgaactgctgataagatgctcaccagcaactagtggagcttggtaaattt

SEQ ID NO: 1000 - protein, 51 aa, Homo sapiens [sequence omitted]

SEQ ID NO: 1001 - DNA, 289 bp, Homo sapiens
  misc_feature (289): wherein any n is one of a or t or g or c
ggatcccagagctggccgcagacactgtccactccgctgggctgagttgtgtcttattttggcacagatgcggggctgccaggtaatgggcaagttccctgagcccacagctttggcgccgtggcttctgcttcagggagtgtgccagtggctcgtgtgggggactcccaccaccctggactctcggtgaccctgacagtccacgaagctgggacggttgccatccgccaggaggtgaagtaacaaggaatgcgtggcctgggggcggtcagggccaggtgctggccgn

SEQ ID NO: 1002 - protein, 56 aa, Homo sapiens
MATVPASWTVRVTESPGWWESPTRATGTLPEAEATAPKLWAQGTCPLPGSPASVPK

SEQ ID NO: 1003 - DNA, 277 bp, Homo sapiens
  misc_feature (1): wherein any n is one of a or t or g or c
ngcattatgtttttggattgtatttcagttgggatcacatattgtaagaaacagaagtcaatcatgactagcttgaatctgaaaggggataagaggaatttgtgggaatgattgataaagctcacaaacttacttggatcacaaatggaataactagacatcaaaaaggaggtcctgaaaatccaatagcagaaataatgggaagtctgttgatgcaactaccatgcagctgtgtccatttcaaccattttctgattaaagtccaggaagaagatct

SEQ ID NO: 1004 - protein, 56 aa, Homo sapiens
MIDKAHKLTWITNGITRHQKGGPENPIAEIMGSLLMQLPCSCVHFNHFLIKVQEED

SEQ ID NO: 1005 - DNA, 417 bp, Homo sapiens
gcgcgcactgtccttcctggacttcacacagaggaccttcattccatcctccctgcaacgatggaaggagctggtgctgtgcccattttacagatgcagatactgcagcccaggccacacagctcccaggtctgagtgaacagcccaggttcttcaccgcgaccccataccacctctcggagaggacagtctcctgcacacagtagcgggtacctaaggctcagggacctgtgggtccccatggcccagaacctaagaaggagggtattagccccaaagaggcatggaccccaccctgggagctcctgggctgggcatcactccagcagggtcccagcggggctgtgtcggccatgtgtgatgcaaagtaatgacacagcctaatgggagaaggtgccaaaaacatgcgtatgtaca

SEQ ID NO: 1006 - protein, 67 aa, Homo sapiens
MGTHRSLSLRYPLLCAGDCPLREVVWGRGEEPGLFTQTWELCGLGCSICICKMGTAPAPSIVAGRME

SEQ ID NO: 1007 - DNA, 950 bp, Homo sapiens
  misc_feature (1)..(2): wherein any n is one of a or t or g or c
nnccacgtcgtcattctccccggggacggtgggagtggcacggccgccatcagcttcacaggggccttgaaaattccaggcgtgatagagttctcactgtgtctgctgtttgccaagctggtcagctatactttcctcttctggctgcccctgtacatcacgaatgtggatcaccttgatgccaaaaaggcggggtgcacaggtagccccgaccctctcaggcattccagccacagaacatcaaagtgagcgagtactgcgctggctgtggcttcagagaacctgtatgtgccacgtggaaaaacaggacaccagagcccaccagacagtgccggccagcagagaagcagagagccagcgccacacaacatcaagaaggccgacaaccaggttggaaaccaagacggagctcagacccaccacatcgccccagaggcttttccagcacccatgatgttccggactgacctaaaaactaattgtcgagaagccaagggtgaggaggcaggaagcacctccggttggaggcacccaggcttgccagccacagagcgccccgaagtcaccgtcatcccagcccctggccttcctgccgccctccggggccatggcgctgctgttcagctcaggcacaggggcacagcagaggtttgggaagcggtctccccaccggcactgggattggcgggtccaagcccagcaaccggcttcgctccacaacacacaccacacctgggactgtttttaatacatagcaacagactgggttatttatttaagatgtgtattgtgtcatatgaagtttaagagacataaatggcattttgttatttattaagacaaactccaattgttctctggctgtttttttcagttgtgtctagcaaaatacttatctgccctttgaaataaaatgtttttgtttaaaaaatctcaaaaaaaaaaaaaaa

SEQ ID NO: 1008 - protein, 82 aa, Homo sapiens
  VARIANT (1): wherein Xaa may be any one of Phe or Ser or Tyr or Cys or Leu or Pro or His or Arg or Ile or Thr or Asn or Val or Ala or Asp or Gly
XHVVILPGDGGSGTAAISFTGALKIPGVIEFSLCLLFAKLVSYTFLFWLPLYITNVDHLDAKKAGCTGSPDPLRHSSHRTSK

SEQ ID NO: 1009 - DNA, 886 bp, Homo sapiens
  misc_feature (1): wherein any n is one of a or t or g or c
nccatgagtcttataacaatgaacttcttgagcaggcagtgtccaacttctttgctcttcagggacctgagtgtgcacctttccctttgcaggtctatttgacatagtaatctagtgtgttggggaggggtagccaagcaggctgcagtgtctgcaatgcagagggcttggggaggtttgggtactctctgctgccactactgggatgatattcagaagagagaggacctcatactgtgactggacccaggaccctccctggaagagagctcagcccagctgtgtgtgtgtgtgtgtgtgagtgtgtgtgtgtgtgtttgtgtgctgtgctcatgtgcacctgggtgtaaaatgactgttatctggttgtgttactcagggtgggctggggactcaccagaagaatcccccccagcctgcccaagacaggtttttcccttgtaccatcttcagagaggtcaggggaagagggtccaggtgggttaaggggggtcgctatggataaccactaagaccagactgctgccaggaggagtgggggataatgaggtggccccagggtcctggcacctggctttggttttccgtcttctttcctcaggacgcccctgaggcctgggacctgtgcctggcttcgaggagcatctgtggctgggtgatccagctgctggtgtgatcatgggcttccctcctctcagcagggcaggcgctcctgccccagagactgggcaactggctgtttctatgacgtatttatttttacttgtgtttcatgtcacttttttaaaaaaaagcaaacagaacaattgtaagtcagtataactgcctatcagttttctttatttctctttttgtaaaataaaatttaaactcaaaaaaaaaaaaa

SEQ ID NO: 1010 - protein, 81 aa, Homo sapiens
LDPGPSLEESSAQLCVCVCVSVCVCVCVLCSCAPGCKMTVIWLCYSGWAGDSPEESPPACPRQVFPLYHLQRGQGKRVQVG

SEQ ID NO: 1011 - DNA, 370 bp, Homo sapiens
catgtttcccagatagaagacggagccctgccgtttgcgatccgccgagggctgcagagagcatcctcatccatttgggcacccctgcccaggaagagcccggccatccctttccggattggatccttaagaggtgaattttcttccgtggattccgatttgctccgtctgaccagcctaggcaatccagcatcgcgtggtaccagtgccgctgggcacactggcttcacgccggctccgcctcaccagcaagcgcattcccaggtggtcaggctcaggatggaccatgagctttcaaaaaggaaaaaggtggaaatcctcaactatgctgccatctgaataagtgtttctttgtagatgcacagagtca

SEQ ID NO: 1012 - protein, 64 aa, Homo sapiens
MLDCLGWSDGANRNPRKKIHLLRIQSGKGWPGSSWAGVPKWMRMLSAALGGSQTAGLRLLSGKH

SEQ ID NO: 1013 - DNA, 813 bp, Homo sapiens
  misc_feature (1)..(466): wherein any n is one of a or t or g or c
nntggccaccgcgcgttcccgcctgaagttttcgtacgcgctgttcctttcgcgtagccaaaatagtaacgacgagtgaaaagaacttcataaacgaggaaaaagaccaacccgcagacccacggcgcgcaccacggaggggcttgcagcgagaagacagggacctccgttcccaagtgcccagcactgcgccacaggccgggtggaacgggccttgagggcctctggtttgaggtcccccacggtcgggctttgggcccaccgcgtgcggcgccgtgctgggctcctaggatcggcagcgagtccagtgactcccaccgcacccccagtaatcacagggcggccggcgaccgcgggcaggggagggggtctgggaaggcccctggagaaggtggcatttcctcgaggtcggtggaatttggctacgcgaaaggaacagcgcgtacgaaaacttcaggcgggaacngcgcggtggcccgtgcgcggcgggtagacgtgcggggccccgggtggggccgtggggagaggtcggcagggggctttcccagggcagagagttagaatttcacgtcctacagaccgggggcacctcgccctggggctgcggggggcggcgaccgtcccattcaagagcgtgattctgaggtttgcacagctgtttcaggccagcagagccttcgctggctcttgacgtccttgcgaggtgatctctgcgaccaccagacaggagagaagacccattttacagatgaggtagtgctatctccaagtcctcaacgaggaaaccgagaagccgccgccccgggcggccgc

SEQ ID NO: 1014 - protein, 155 aa, Homo sapiens
  VARIANT (125): wherein Xaa may be any one of Arg or Cys or Gly or Ser
TRKKTNPQTHGAHHGGACSEKTGTSVPKCPALRHRPGGTGLEGLWFEVPHGRALGPPRAAPCWAPRIGSESSDSHRTPSNHRAAGDRGQGRGSGKAPGEGGISSRSVEFGYAKGTARTKTSGGNXAVARARRVDVRGPGWGRGERSAGGFPRAES

SEQ ID NO: 1015 - DNA, 621 bp, Homo sapiens
tttttttttgaacttgaaaaccgtaatttcctttatccagtgtgttgaaggagaggagagagctgtgtgaatgtcagagctgggagggatttcagagatctcagatctatgcccttattttaaggaggaggctgaggcttgcagtagtgcgaggctgcgtcacggtcgcttgctaccgaggatgaacaggacgccgagtctccttgtgcgtccagcctgacgtagacgcagaagcgcaaaggcagcggccccgcactgggcactggggctgcgctaaagccggggtgcgggctgcacgtcttcctgatggaatgcctgagccactgatggctgtgaatctatacccgcacccagcctgctcggagcagtgcccggggtcacagtcacctctggggatgctgcagggtccgtgcataaagcagggctgccacttcagggttcatgacagagcccgtgagcacagttctccgctggtaaattgcctgctctgccttgctgaaaatcaagctcaggaatgaccttggccccatgaaagccgcatgggtgtgggagttaaggtcgctgtcttcgaacagcccaggaggtgttacgagcactgctccggagcgcctgctgctagcc

SEQ ID NO: 1016 - protein, 80 aa, Homo sapiens
MHGPCSIPRGDCDPGHCSEQAGCGYRFTAISGSGIPSGRRAARTPALAQPQCPVRGRCLCASASTSGWTHKETRRPVHPR

SEQ ID NO: 1017 - DNA, 390 bp, Homo sapiens
cctaggcctggcatggagtggccagggcgaggctggttctgctgtccgctctccccagggtcccgccacgagggtggcgtggcatggggcacatcgcccggacttcctgtccctcttgggtttaggaatgggatggtgaggcctccctggcagcttgttaggaggagtaaaccaagcgagccgaccagctcccagcagggtcccggcacacaggaaaagacccacaaagagaagcccaaccagccagcccccaggccgccccgccagggacccggctggagcagaagcagtcccgggcctggggccccacatcgcaggacaccatccgaaaccaggtgagaaaggaacttcaagccgaagccaccgtcagcgggagccccgaggccccag

SEQ ID NO: 1018 - protein, 112 aa, Homo sapiens
PRPGMEWPGRGWFCCPLSPGSRHEGGVAWGTSPGLPVPLGFRNGMVRPPWQLVRRSKPSEPTSSQQGPGTQEKTHKEKPNQPAPRPPRQGPGWSRSSPGPGAPHRRTPSETR

SEQ ID NO: 1019 - DNA, 1002 bp, Homo sapiens
tagtcgattgtcacgtggcaggccaggggaaggcgggacttccggcggcgaggtaaatttttttttttttttttttttttttttttttcttccggtggctggtctccggcggccccgtccccgactgggccccgtgcccccccgcccccgcggccccccgccgccgggccaccgccaccatgaagaaattctttcaggagttcaaggccgacatcaagttcaaaagcgcgggacccggtcagaagctcaaagagtccgtgggggaaaaggcccacaaagagaagcccaaccagccagcccccaggccgccccgccagggacccaccaatgaggcacagatggcagccgctgctgccctagcccggctggagcagaagcagtcccgggcctggggccccacatcgcaggacaccatccgaaaccaggtgagaaaggaacttcaagccgaagccaccgtcagcgggagccccgaggccccagggaccaacgtggtatctgagcccagagaggaaggctctgcccacctggctgtgcctggcgtgtacttcacctgtccgctcactggggccaccctgaggaaggaccagcgggacgcctgcatcaaggaggccattctcttgcacttctccaccgacccagtggccgcctccatcatgaagatctacacgttcaacaaagaccaggaccgggtgaagctgggtgtggacaccattgccaagtacctggacaacatccacctgcaccccgaggaggagaagtaccggaagatcaagctgcagaacaaggtgtttcaggagcgcattaactgcctggaagggacccacgagttttttgaggccattgggttccagaaggtgttgcttcccgcccaggatcaggaggaccccgaggagttctacgtgctgagcgagaccaccttggcccagccccagagcctggagaggcacaaggaacagctgctggctgcggacgccgtgcgcgccaagctggacaggcagcgcg

SEQ ID NO: 1020 - protein, 59 aa, Homo sapiens
SIVTWQARGRRDFRRRGKFFFFFFFFFFSSGGWSPAAPSPTGPRAPPPPRPPAAGPPPP

SEQ ID NO: 1021 - DNA, 1384 bp, Homo sapiens
atgcatagttgcagaggtccctgctacctccccagggatcataaccgaatcctcaacctgttctggacaaccaagttgtccatttgccaagcctatgccaccaggttgggagggcaaggaagaggctctgctcagccaaatgctaggccttgtcctcaagtcagctgaatcattgtagtctggacttttgggaaacacgtggttttgaccttttcttcttgctggagtcaaggctacagagcttccctatcaaacttgataattctttttcttggatttcccaaactgaaactgttagtatccagatcttgcacctgacatttacttgtctcagagaagcccataacagaggttcagatatcaaaggagcagtcccactgcaggccactgatcacggcctgacgaactgtaacgtccaaactgtccaggaagcccttgacatcaggcagacagaaaggctgaggaaccaaaaattttatatgctgggcacacaactgctcacctgtgcactgggggcactacaggatcttgcgcacatcctggtgtgtttagagatcaacaggcactgcatggcccgcaggctgtgcagctcctcctgcccagggcttcagagcttgctccaggtaatacactttaaaaaaaggattcctaaattatccactttgggtttttaaatgctaggatcttcaagggggaattaaaacttttgtctgatttttctacttttttctacttagcttactcctcgaagccacaggaccagtctatgttattgtcctggccactttcagactctcattttgcagctactggaattccggaggtgagcgctggagctgctgatcaggcccattcccaggttctccgggaagggagcaaagcgggaggcggcacgctcctttgtcttccactggctgaatgccaaaatccttcacgctaccagtctctgcgaactccaggtagaagtagccacacttgactgcccggtgcacctcaaagcagaatcccaaacaagaatcctctatcaggtctacgtaaatctcctgagcgatggcctctagcttgttagtatccaggttggccaacgaaatttcctccattttaatttgtaaacgagtgcggagagggcgctcgttttactcacggcagcaacacgtctggctccgcgggccgcgcctaggcctagaggcctttcagtgcccagtcctccggcggcggggtcggtggcgtccgcaactgcaggagcagcgataggggcgactgctccggaatcccaagtccttctgtttgttttgacgtttcccgggttgcgggcctttcacgtgcgcctggcccaggactcaccgccaaaccgtctcagcgcctcacccagcctcctgggcct

SEQ ID NO: 1022 - protein, 97 aa, Homo sapiens
MEEISLANLDTNKLEAIAQEIYVDLIEDSCLGFCFEVHRAVKCGYFYLEFAETGSVKDFGIQPVEDKGACRLPLCSLPGEPGNGPDQQLQRSPPEFQ

SEQ ID NO: 1023 - DNA, 798 bp, Homo sapiens
  misc_feature (1): wherein any n is one of a or t or g or c
naaattattggattttctgggaatagggagttgggcctcctgcagttacgtgaaggtgcttcaggaaggagcatgaggtctgcactgtgctgcttaaccatcttagcttttcatacttacatctccctaatacttggtacaggagaagtgaatgttgcggaagcagagcgtctcctggcacccttcctccagcagtttccaaatggctcactcgtgttgttttatcatgcccgaatagagttgctgaaagggaatcttgaagaggcacaagaagtatttcaaaaatgcatttcagttcaagaagaatggaaacagtttcaccatctctgctactgggagctaatgtggattaatgttttccaacaaaactggatgcaggcatattactattcagatctgctttgcaaagagagtaaatggtccaaggcaacttatgtgttcttgaaagcagcaattttgagtatgcttccagaggaggatgtagtagcaacgaatgagaatgtggtaactttattcagacaggtggacagcttgaagcagagaattgccgggaaatctatccctactgagaagtttgctgtgaggaaggctcggcgttactccgcctccttacctgcacctgtgaagctcatcttacctgccctggaaatgatgtatgtctggaatggtttttcaatagtgagcaaaagaaagactttctgaaatctgttagtactgttgaaaagcgaggcagcttacaagtcaaattttacagctctctgtggatgatatgctagtgagtactaaagatgtgctcag

SEQ ID NO: 1024 - protein, 233 aa, Homo sapiens
  VARIANT (1): wherein Xaa may be any one of Gln or Glu or Lys
XIIGFSGNRELGLLQLREGASGRSMRSALCCLTILAFHTYISLILGTGEVNVAEAERLLAPFLQQFPNGSLVLFYHARIELLKGNLEEAQEVFQKCISVQEEWKQFHHLCYWELMWINVFQQNWMQAYYYSDLLCKESKWSKATYVFLKAAILSMLPEEDVVATNENVVTLFRQVDSLKQRIAGKSIPTEKFAVRKARRYSASLPAPVKLILPALEMMYVWNGFSIVSKRKTF

SEQ ID NO: 1025 - DNA, 1144 bp, Homo sapiens
gggccgcgatctcaaaccaaacacaagaattggcgtgtgactcatctgcttggatacctccagtccccaaactgtgttccaggagttttcttggccgaagctgcccgatgtttgagccttttcttcccagagaagaagatggactgaaagctgccagttggggactttttgtgatcacggcgttgcagcgttttaaaggaggtgatggggcttgcgctggcttgtcttcccacccaagtgaagagttgatgttcactggttatacttagacaatgtgcagtttgtgttaatttaaaattttgggtgggataggggcataggcttgtgaagggcagtccggatccggaggaactcctctttgtccctggtaggagagacacccccagtctatcctcgatgccgtcagccttggccatcttcacttgccgcccgaactcgcacccgtttcaggagcgtcatgtctacctggacgagcccatcaaaatcggccgctcagtggcccgctgtcgaccagcgcagaataatgccacttttgattgcaaagtgctatcaaggaaccacgctctcgtctggtttgatcacaagacgggcaagttttatcttcaagacactaaaagtagtaatggtacttttataaatagccagagattgagtcgaggctctgaagaaagtccaccatgtgaaattctttccggtgacattatccagtttggagtagacgtgacagagaatacacggaaagttacccatgggtgtattgtttccacaataaaactttttctaccagatggtatggaagcccggctccgctcagatgtcatccatgcaccattaccaagtcctgttgacaaagttgctgctaacactccaagtatgtactctcaggaactattccagctttctcagtatctacagatagagtaactgagaggcaggaagatttaataatttatacagtatcacatatcaagtatatggtagagctgggatttgaacctggacagccagacctcagattttctgctttgtgtaactactgtgctgtgctgctggattcacagaataatttcttggtgtagagcagatactgcttcaagttaatgccatatttaaagaaccgtataaatctttaaaaagcaaaaaa

SEQ ID NO: 1026 - protein, 175 aa, Homo sapiens
MPSALAIFTCRPNSHPFQERHVYLDEPIKIGRSVARCRPAQNNATFDCKVLSRNHALVWFDHKTGKFYLQDTKSSNGTFINSQRLSRGSEESPPCEILSGDIIQFGVDVTENTRKVTHGCIVSTIKLFLPDGMEARLRSDVIHAPLPSPVDKVAANTPSMYSQELFQLSQYLQIE

SEQ ID NO: 1027 - DNA, 705 bp, Homo sapiens
  misc_feature (1): wherein any n is one of a or t or g or c
nagacacttgacgatgcctactctcaggagcaagtgtgtagtttagataaagagctgaagaaactaaagaaagccgtggccacctctgataagctagccacagctgagctcaccattgccaaagaccagctgaagtcccttcatggaactgttatgaaatttaaccaggagcgagcagaggtgagttcacatgtcagaccaggtttccatcaatgatgctgctgccaaaaacatggccaccttgtattattgatcttgctatagccattggttattttataaaccactgtaaagttgtctgtttttcttaagacctaaagattatattccccccatcacaacccccaataatttattttgtgctgccatggatactgcgttctactgagccctgaaaggaatcatcaaataaacatgctatccctacctttaagtgtaaggatgcttagggaggtagctgtcaatatctacctggacaagggttcctgaaggattgttatataatccctctgaatctcaaatttttcatctcgtgcagtcatgtgaaaatgttacttcatagtatgactccttactgagctaatgtctgttactgtgctttataggatgcaaatgctaatgagattaagatagcagatcataggagacaaaaatctaatgatgagagcccagagagacataatcatggaagacggtagtaaaagt

SEQ ID NO: 1028 - protein, 71 aa, Homo sapiens
  VARIANT (1): wherein Xaa may be any one of Gln or Glu or Lys
XTLDDAYSQEQVCSLDKELKKLKKAVATSDKLATAELTIAKDQLKSLHGTVMKFNQERAEVSSHVRPGFHQ

SEQ ID NO: 1029 - DNA, 546 bp, Homo sapiens
agcagcctagcagtacaagttagtatgaagcatgagattgaacttgccatgaagttgctggagaaagatatccatgagaaacaagatactctgataggccttcgacaacaactagaggaagttaaagcaattaacatagagatgtatcaaaagttgcagggttctgaagatggcttgaaagaaaaaaatgaaataattgcccgactagaagaaaaaaccaataaaattactgcagccatgaggcagctggaacaaaggtacagcatttccagtcttagtttctttttttcttttcttcttccctttttctttattcagttcctacacctgccacaaaaaccattaggaagacatagattaggacatgttttttgtttaagcccagcaggattttgcgtttttgctttggttgttgcatggaatcaagttgctttatattacgctgattcatttgaagttgtcatattgtagatttttcttagaggcctaatatcagcagtttcatgtcgttcagttacataaaacaaatacacaaataaaaatgtc

SEQ ID NO: 1030 - protein, 156 aa, Homo sapiens
SSLAVQVSMKHEIELAMKLLEKDIHEKQDTLIGLRQQLEEVKAINIEMYQKLQGSEDGLKEKNEIIARLEEKTNKITAAMRQLEQRYSISSLSFFFSFLLPFFFIQFLHLPQKPLGRHRLGHVFCLSPAGFCVFALVVAWNQVALYYADSFEVVIL

SEQ ID NO: 1031 - DNA, 686 bp, Homo sapiens
ccgcggcggagtccgcagcctccctgcctgaggcgtccgcggccgggatccggcccctcccctcgcctcctctcctaggtgccggccgggagggcggccgcagcagattttatcatgtgggcaacctgctgcaactggttctgcctggatggacagcctgaggaggtcccaccaccccagggagccaggatgcaggcctattccaaccctgggtacagctccttcccttccccaacaggcttggaacctcccctcttcatctgcacaagccacctctgttcccccagcccaggttcaggagaatcagcaggccaatggccatgtgtctcaggatcaagaggaacccgtctacctggagagcgtggccagagtacctgctgaggatgagacccagtctattgactcagaggacagctttgtcccaggccgaagggcctctctgtctgacctgactgacctggaggacattgaaggcctgacagtgcggcagctgaaagagatcttggctcgcaactttgtcaactacaagggctgctgtgagaagtgggagctgatggagagagtgacccggctatacaaggatcagaaaggactccagcacctggtcagtggtgccgaagaccaaaacgggggagcagtaccatcaggcttggaggagaacctgtgtaagatctgcatggactcac

SEQ ID NO: 1032 - protein, 179 aa, Homo sapiens
MDSLRRSHHPREPGCRPIPTLGTAPSLPQQAWNLPSSSAQATSVPPAQVQENQQANGHVSQDQEEPVYLESVARVPAEDETQSIDSEDSFVPGRRASLSDLTDLEDIEGLTVRQLKEILARNFVNYKGCCEKWELMERVTRLYKDQKGLQHLVSGAEDQNGGAVPSGLEENLCKICMDS

SEQ ID NO: 1033 - DNA, 1050 bp, Homo sapiens
  misc_feature (867)..(993): wherein any n is one of a or t or g or c
ttaggttggtgcaaaagtgcaaaagccacaattacttttgcaccaacttaatataaaataagattgcaataatttctaaaataaagatatttctatcacaaggactagacaaattagtttacagtttacaagctaaagcaaatttagaatgctaaggatgactagtttttcattattctttgccctcagatgaatttttttttctctgtcttggtttctaaaatttccaggttcaccaccaaccctctccttactgcccccaacatatacaaattttgcctacatttatcctctatgtatgtgaatacattcatgtaggctagaaatgccttatactctgccgctggcctggaaagtagtcttcctacaaggggcctttgcacatctctgatttcttccattatgacttggtgctaatttttaaatccaactctcagagtttatggggatccttggtggcaactttaccaccaacaccacccacacacatccccgactcctggtctgtgcctgtgccattttctcagtctttaaacccttttctgtcccctccacctttgaaatccttacttggcaatcacatcctttttcaaatgcctactacctcaattaaacttttattatctccctaagtgaaactttccaatgtatatgatacatattagaaatgaaatcaaagttccccttttctagtcagttccccaaatggctgagccaattctgtactcttcaaattactcttgcttttgcaaggatttttaatgcttggagtatcaatttcaactgttttactctagaaagttagatactgatgacctgggagctgatcagagcattgaaattgtaggattgaaagccccactccangtggaccggagtcgaagctaaggcttgtagtgcctagaggatgtccgccggtaaaaacaccctcttggacaaagatacggctttctgggggggagccccgttaacagccctgggggataaaacccnggggggggttctccctaaccgtagggtataacgctgggcggcgcggccctgagacgg

SEQ ID NO: 1034 - protein, 71 aa, Homo sapiens [sequence omitted]

SEQ ID NO: 1035 - DNA, 996 bp, Homo sapiens
caggttgcaagcaccgaggtggtgttgtatcaagaataaagacacacactacttgttctttcctatcatgaaaacctgctaatagaaacaagatctcttagttctgtaaagataacagcatgtgaagaagttggcttcaatagcaaaggccatctttcctgagccaggaactataaagttcagaaagattgtacaactgatattaagcccttttggcaatcaaaacaaacacacacaagtttgatgtgtcaatgcaacatgatggatacatgctgtaacactatctggtggtggtgacatgtgagctacatccaaaacttaagattaaatgacaatttttcttttctaatgaatctgcaaaaatcatttctgaaattctgctaaatttaggaatgttttaatctctagcccaggtttctttcctcccaccccctaatctcaatctgtagtttcctggtgtactagtgaaacactttagataattagtcagaatattagttctcattaacacaaatatttattgatactatttatacagtaaattaggttgaatgtgaagttttggatagcctgaattcaccattttcttgtgcacaaatgggcatttttctcatttacaaatgggcatttctctttggcatccattaggtatttgcccagatattggcctctgtcaaatattttttaaaaatcaacctagtttctattaaacaaaactaaaagtgattctatggagagtgattgtatgattaccaaacacatctgatgttaaatgtcattaaagtgctgtttgatgatctctgtcggtttgtgctaattaagacagagagggctgggattttataaatcccaagagtcttatctgaacagtctgcatataaaagttgttttttagcctggtgaagggtatccatgaagccgtggacttctgcattcttgtctttgctggtcagtaacagccatctttccaactgtcatctttcatgctaccatagg

SEQ ID NO: 1036 - protein, 54 aa, Homo sapiens
MDTLHQAKKQLLYADCSDKTLGIYKIPALSVLISTNRQRSSNSTLMTFNIRCVW

SEQ ID NO: 1037 - DNA, 534 bp, Homo sapiens
  misc_feature (211)..(356): wherein any n is one of a or t or g or c
cgtcgacccacagcagcggagttcatacatgcacgcgcatgggcggcaccgatgctgtcatcactaacgtttcagggtcagtgtcgagtgcaggccgcccagcctccgcatcacccgcccccaatgccaatgcagatggcaccaaaaccagcaggagctctgtagaaaccacaccatccgttattcagcacgtgggccagcccccggccanctcctgccaagcacagtagcagcaccnnagcagcaagggcgccaaagccagcaaccncagaaccgagtttcaaagcaaacgagaacggccttccaccaagctctatatttctgtctccaaatgaggcattcaggntccccaccaattccctaccccaggagttacctcccttacccagcccctgagggcattgctgtaagtcccctctccttacatggcaaaggacctgtctaccctcacccagttttgttacccaatggcagtctgtttcctgggcaccttgccccaaagcctgggctgccctatgggcttcccaccggccg

SEQ ID NO: 1038 - protein, 76 aa, Homo sapiens
  VARIANT (16): wherein Xaa may be any one of Ala or Pro or Ser or Thr
  VARIANT (25): wherein Xaa may be any one of Ala or Arg or Glu or Gln or Gly or Ile or Leu or Lys or Pro or Ser or Thr or Val
  VARIANT (35): wherein Xaa may be any one of Ala or Pro or Ser or Thr
  VARIANT (61): wherein Xaa may be any one of Ile or Leu or Phe or Val
KPHHPLFSTWASPRPXPAKHSSSTXAARAPKPATXEPSFKANENGLPPSSIFLSPNEAFRXPTNSLPQELPPLPSP

SEQ ID NO: 1039 - DNA, 914 bp, Homo sapiens
ccggaagccattgggtctcttgtaaaactccaatgtctggatcttagtgacaatgccttagaaattgtttgcccagaaattggtcgtctgagagctttacgtcatcttcgattagctaataaccaactgcaattcctacctccagaggttggcgatttgaaggagctgcagacactagacatttctaccaatcgtttgctaactttacccgagaggcttcacatgtgcctttctctgcagtacctcactgtggaccgaaatcgtctatggtatgtgccgcgccatctctgccagctgcccagcctcaatgagctctccatggctggaaaccgtcttgcatttttgccacttgatttaggtcgatctcgagaactacagtatgtatacgtggataacaacattcacctgaaaggcttgccatcttatctgtacaataaagtcatcgggtgcagtggctgtggtgctcccattcaagtttccgaggtgaagctgctttccttttcatcagggcagcgaaccgttttcctcccagctgaggtgaaggccatagggacggagcatgatcacgtcctccctctgcaggaattggctatgagagggctgtatcatacctaccacagcttgctgaaaggaagacaactgttagttttgtggcttactgctgctccacccagtgtctgcagacttttgacctgctgagttgataaacactcaagaacctcaggagcgctgccagcttgacactggggaatccagccagtccagcacactcttccatcctgtcctgtccaatgcgggggcactgcagaactctctagaaatgtcatgattgagcttcagagctaaaatgccttcacccttcccccaagttggaatatatcctcccccaaattaaaaaaaaaaaaaaaaaaaaa

SEQ ID NO: 1040 - protein, 232 aa, Homo sapiens
PEAIGSLVKLQCLDLSDNALEIVCPEIGRLRALRHLRLANNQLQFLPPEVGDLKELQTLDISTNRLLTLPERLHMCLSLQYLTVDRNRLWYVPRHLCQLPSLNELSMAGNRLAFLPLDLGRSRELQYVYVDNNIHLKGLPSYLYNKVIGCSGCGAPIQVSEVKLLSFSSGQRTVFLPAEVKAIGTEHDHVLPLQELAMRGLYHTYHSLLKGRQLLVLWLTAAPPSVCRLLTC

SEQ ID NO: 1041 - DNA, 1307 bp, Homo sapiens
ctaggagagattgagatgtggaatgaggctgagaagcaactgcagaacagcttgatggactttggagaaccgtggaaaatgaacccaggagatggagcattttatggccctaaaattgacataaaaatcaaggatgctattggcagataccatcaatgtgctacaattcagctggacttccaactgcctattagatttaatctcacatatgttagtaaggatggggatgataagaagagacctgtgatcattcatcgagccattttgggatcagtggaaagaatgatagccattctttcagaaaactatggcggaaaatggcctttctggctatctcctcgtcaggtgatggtcatccctgtggggccaacttgtgaaaaatatgcacttcaggtatccagtgaattttttgaagaaggatttatggctgacgttgacttggatcacagttgtacactaaataagaaaatacgaaatgcacagctggctcagtataattttattttggtggttggagaaaaggaaaagatagataatgctgtaaacgtgcgaacaagagacaacaaaattcatggagagattttagtaacttctgccattgataaactgaagaatctcaggaagacacggacactcaatgctgaggaggccttttgaagtccttccctgatatttgcttctgtgtaactttgttttgacccttaaaaatgtatttttcttaacatgttagtacttctacgactttggagccactgatgggtccactcatggcctcagctgagaaaggagacgatgaacgtgtagctgacatgcacgaagtttaatttactcatgtccacgggggacgtttagagggcacgtgggaaattttccagcaatcaatgccttgagaaacttaaatggggaaatattattcatcgagaaagtgaaacaaaacactaggaaatgattatgaaatgttagtgattttcaaaagatgggcttcaaataaaagtctgcagagttttttttaaataggagggaaaatcttattttctagtatgtctcaggtatttttatgacttctactaaaattcacactgaaactttatcttctaaactggaatcattacttaattttaactaaccaacaaccacaaaagcagcagctactactaaatattggattactgacaaaggaattcagttttgtggaatctggtgtttgcactataggttaagagttgccatttaaatgtttcttattcataattaggttttgttccgctttagaaaaaaataaattcccaaatgaattgcaaaaaaaa

SEQ ID NO: 1042 - protein, 218 aa, Homo sapiens
LGEIEMWNEAEKQLQNSLMDFGEPWKMNPGDGAFYGPKIDIKIKDAIGRYHQCATIQLDFQLPIRFNLTYVSKDGDDKKRPVIIHRAILGSVERMIAILSENYGGKWPFWLSPRQVMVIPVGPTCEKYALQVSSEFFEEGFMADVDLDHSCTLNKKIRNAQLAQYNFILVVGEKEKIDNAVNVRTRDNKIHGEILVTSAIDKLKNLRKTRTLNAEEAF

SEQ ID NO: 1043 - DNA, 324 bp, Homo sapiens
gcaaaccccgactgattcctaggcagacgtccgggggccccatctgccctgactgcggctgtaccttcccatgatcatcgggccctggagagccacaagtgcgcccagaatctaaaaaagccttacccttgcccagactgtgggcgccgcttttcctatccatccctgctggtcagtcaccggcgggcacactccggcgagtgcccctatgtttgtgaccagtgtggcaaacgtttctcccagcgcaagaacctctcccagcaccaggtcatccatacaggggagaagccctatcactgccctgactgtggtcgctgcttccgg

SEQ ID NO: 1044 - protein, 103 aa, Homo sapiens
FLGRRPGAPSALTAAVPSHDHRALESHKCAQNLKKPYPCPDCGRRFSYPSLLVSHRRAHSGECPYVCDQCGKRFSQRKNLSQHQVIHTGEKPYHCPDCGRCFR

SEQ ID NO: 1045 - DNA, 639 bp, Homo sapiens
  misc_feature (589): wherein any n is one of a or t or g or c
ttatgaatgcctatgagcccagtgtcagtgacgactttctagcggcggtcttcaacactttctaaatattaagcgatcaaggcccctgccccacttttagttccaacagaatgccgttcacaagatctgggaggcactctctcagccctctcctggagcccccggaatttctcagcagcccaggccctcccgctgcccgtggcccctcctcccaggtgccaggtggtcttccagcctctccaagggcccacccccctgcctcttcctcccactgcagctgatctaggggtttcttggccacatttcccttgagagagagtgggatttgccctatccacagagagcctcatttccacctgaaggtgtatttgtcagtggctagaccaggttcatgtctgtttccccttggggacttctgaaccttcctgcccgggagtctgtaacacagcagcacaggaccgcgcttcctttagcagtgctgagtaagcaggcagcggcactctgagatcccggggctgggcagtcgccccccacttcccagcagctctgtggtagtggggcgggagcagcagggacgtaccttaagatntctccagtgtctgactcttactttgtttcctgaaataattagagaagagt

SEQ ID NO: 1046 - protein, 93 aa, Homo sapiens
MRLSVDRANPTLSQGKCGQETPRSAAVGGRGRGVGPWRGWKTTWHLGGGATGSGRAWAAEKFRGLQERAERVPPRSCERHSVGTKSGAGALIA

SEQ ID NO: 1047 - DNA, 533 bp, Homo sapiens
tttgaaaaataaatcaatttatttcctcaaaattcacaacttttatgtctcagaagacatgaagaaaaaagttgaaagacaaaatgttataataggaaaaacaactgtcttatagtatactctcaacactcaacacagaacacttctgttaccagatacatgggttttttccccacacagaccaaatcttgggtaccagctgcgtgtcctacagtgcaatccaattgtgacagtaaatggagaaagcatcagaccccacaggctaagggctcagtcctaggaatacacgtcatgccccttgtcgcttgcaaatttaaatgacaaacacaaggatggtaaaaagaaagtgactttatgccagagcttagctgaagggaacatacaggctcttgccttaagggaagcgcttccactttctgggcagaaagcggggccttcggacttgccagaatggcatgcaggggatgaggtgaggaggtgcggggtctatgggacatgctctgatgttttctccattaggtggtcttgctagc

SEQ ID NO: 1048 - protein, 82 aa, Homo sapiens
MSHRPRTSSPHPLHAILASPKAPLSAQKVEALPLRQEPVCSLQLSSGIKSLSFYHPCVCHLNLQATRGMTCIPRTEPLACGV

SEQ ID NO: 1049 - DNA, 1071 bp, Homo sapiens
  misc_feature (469)..(470): wherein any n is one of a or t or g or c
ttttctattattgtctacttggacttaaagttgtaaatccaagtggtaaggccttcttcactctaaagggcattttgcctcatcagtttttattccctttcttactactgatatatatatatcaatcatatatatcatatatacacacacatatatacatatacatacaaagattgttttatttttcaatgtttttattgtgataaaatacacataaaattcaccatattaaccctttcgagtatacaattcagtagtattaagtacattcatactgctgtgcaaccatcaccgtaatccatctccaggactcatttcttcttcccaaactgaaaccttgtacacattacacagtaattccctctcgctgcccttcctgcaacccctggcaaccatcattctactttctgtctctataattctgatgctgcccaagctggggtgcagtggctattcacaggcacaatcnnagcatactgcagccttgaacttcaggccccaagcaatcctactacctcagtttccagagtagctgggactacatacaaggtttcaatccttgaagcagttgtacactgaatggttttcatataattaatcaaggtataagtaggtgttaatgggttgaactgtgtcctcccaatattcgtatgttaaaagtcctagcccctactacctcatactgtgaccttatttggtaatagagtcattacagatgtcagcagctaagatgaggtcattaacagagcaggatggaccccaatccaatatgactagtctccttatattaggactcagatacacacacaggaagaacttcatgtgaagactggagttatgctgccacaagttaaggaaccacaagaaattagaaggactggaaatttttttttcagtgccttcagagggacggccctgccaacactttggttttagacatctgacctttatttataactatcaaacaatttctgttattctaagctacccaatttgtggtgctttgttacagcaggcctaggaaactaaaactaacacagtaggtatgaaccctattttgcagatataatg

SEQ ID NO: 1050 - protein, 73 aa, Homo sapiens
  VARIANT (38): wherein Xaa may be any one of Ala or Arg or Glu or Gln or Gly or Ile or Leu or Lys or Pro or Ser or Thr or Val
FPLAALPATPGNHHSTFCLYNSDAAQAGVQWLFTGTIXAYCSLELQAPSNPTTSVSRVAGTTYKVSILEAVVH

SEQ ID NO: 1051 - DNA, 1005 bp, Homo sapiens
  misc_feature (1)..(2): wherein any n is one of a or t or g or c
nnactcataaccagccggtgaggtcggtacttcgctcctcctcattctgcggaggggaaagcagcacggaaatgccctgtgactggcagcggaaaaggcgaccaccgcttgtgtatcttcagtttagatcttggaggcatatcaactgtggttctaaatggctatgatgtagtaaaggaatgccttgttcatcaaagcgaaatttttgcagacagaccatgccttcctttattcatgaagatgacaaaaatgggaggcttactcaattccagatatggccgaggatgggttgatcacagacgattagctgtaaacagttttcgatattttggatatggccaaaagtcttttgaatctaaaatcttggaagaaaccaaatttttcaatgatgctattgaaacatacaaaggtagaccttttgactttaaacagttaataacgaatgctgtttcaaacataaccaatctgatcatttttggagaacgattcacttatgaagacaccgattttcagcacatgattgagttatttagtgaaaatgtggaactagctgccagtgcctcagtcttcttgtataatgcctttccatggattggcatcctgccttttggaaaacatcaacagctgtttagaaatgcagctgtagtctatgattttctctccagactcattgaaaaagcttcagtcaacagaaagcctcagctacctcagcattttgttgatgcttatttagatgagatggatcaaggtaaaaatgacccatcatctactttctccaaagaaaacctaattttctcagtgggtgaactcatcattgctggaactgaaactacaaccaatgtgctacggtgggcgattcttttcatggccctttatcctaatattcaaggacaagttcagaaagagattgatttaattatgggccctaatgggaagccttcttgggacgacaaatgcaaaatgccttatactgaggcagttttgcatgaagtgttaagattctgt

SEQ ID NO: 1052 - protein, 328 aa, Homo sapiens
GRYFAPPHSAEGKAARKCPVTGSGKGDHRLCIFSLDLGGISTVVLNGYDVVKECLVHQSEIFADRPCLPLFMKMTKMGGLLNSRYGRGWVDHRRLAVNSFRYFGYGQKSFESKILEETKFFNDAIETYKGRPFDFKQLITNAVSNITNLIIFGERFTYEDTDFQHMIELFSENVELAASASVFLYNAFPWIGILPFGKHQQLFRNAAVVYDFLSRLIEKASVNRKPQLPQHFVDAYLDEMDQGKNDPSSTFSKENLIFSVGELIIAGTETTTNVLRWAILFMALYPNIQGQVQKEIDLIMGPNGKPSWDDKCKMPYTEAVLHEVLRFC

SEQ ID NO: 1053 - DNA, 666 bp, Homo sapiens
  misc_feature (646): wherein any n is one of a or t or g or c
gcagctagaaaagatggtttaatatggttttacatgacattagaacatttgtctgagtggttacttttggggatggaattctagaggatttgtatttatttctgtagacttctcacacaatccaagttttaccaatgagccaatgttacttttataatcagaacaaaaatagttgtttcagaaaatggatcttgttgacacaagtctaaagggaccttcatgtgggtcatgagcatgtgatgccatgctgcttcctgactggcccctcgccaggcctcccttcttggcacagaagcagtgaccagctgagatggtttgctttgggcattctgcattctcttcctgggtgatcatctgcagcctgttgagaaagaggctttaacttcatagcacgagagctgggacatcaccatatggcagacccggctacagaggaaacacccaaaaatgacagactggctgcatccacactgacttggactcaaagccatgaccataggtttttatggcctccttgtgaggaggtgggtatgattattgatgattggcagatggggaagaaacagaagttccaagatgccatgacggtggccaacgctcatctagcttgttatgtatcataactgggaccagaactagtgtcttnttttctgcccaacaggtttc

SEQ ID NO: 1054 - protein, 69 aa, Homo sapiens
MADPATEETPKNDRLAASTLTWTQSHDHRFLWPPCEEVGMIIDDWQMGKKQKFQDAMTVANAHLACYVS

SEQ ID NO: 1055 - DNA, 1092 bp, Homo sapiens
  misc_feature (984)..(1089): Wherein any n is one of a or t or c or g
gcggccgccatactgggggagcatgggctgctgggcggcggagccattgggatactgcgatggggggaacacggggcttgagtgcactggttgggcgccgccggcagggcaccaagtgctgcgtggagctgcagggccccaggggctgcccagactggccctcaccgctggctgtgcccgccgccccgtactggccgcccacagggcccgacgacgtctctaggaaactggcctctgggaaggccgttgagtgcttgcgcttttccgccccagagctgctcacgccgcaagggtacagggggacactctgcaggaagggcaccggcgtgctgaaggggccttctagcattttccgcagctgcttctccttcttggccacttcgttcaggaagagcttggagttcaggtggccgatcttagtgggggaaaggctgctgctcgtgcaggtctgggtcctgtccatcaggattttcacagacttggtgttcttcatgaagctgacatcctccgtcttatcaaagagcagctgcagggagcccagcagcttcttggcctcctgcatgctccccgaggtcagcgcctgcgctgcgttctcgctgcagaacttggcctgggccttgtctaggacctccactgtctgccgcaggtcctcgtccagcagctggtgcagcttctcgtactgcagccgaacttcctccttcagttggttcactttctcctccaccaggcgcttgtctgactcgagtttgtacagctggtcctcaatgtcctgctctcgctcctccagccggtcctgctgcttcatgagcatcttccggatttcattccttcggatctccacgtcgcacaccgagtgtccctgatgcgcgccgctgtagtagcagcagtactggcacacggccacctgctcggcctcgcagtggtagaggcggtaggcgtttgtgcttgcgggcagttccagggcccgaacgttcgttccgcttncaacagggaggttgcccgcgggcggttgggaagggttgtttnaaggtgcgttttnaagtngggatttggaagcaagggcgntttggaagtgaatggaagaacttnttt

SEQ ID NO: 1056 - protein, 101 aa, Homo sapiens
HPPSYQRAAAGSPAASWPPACSPRSAPALRSRCRTWPGPCLGPPLSAAGPRPAAGAASRTAAELPPSVGSLSPPPGACLTRVCTAGPQCPALAPPAGPAAS

SEQ ID NO: 1057 - DNA, 550 bp, Homo sapiens
cggccgcggcaaggcgtcaccggccaccggccgccgagatctggccatctaggggcgggcaccgcctcgcgcggactggacggcgagggccggaccccgccacctccgcccgcaccgcagaagccggaagctgcttccaccagagctgtcgcgggacctgccccggcaggagacgcgttgtggggacggcccgcgggcggcatcgcacttgcctcgtactgcctcccagtggctgccggcggcacctggggcaggccgggctgggggcggagaatgaactcaggcaggtcctggatgccaccacccaggtggaaaggaaggagaccaggaccctgagagagagtggacccgagggggagaacagagcggaaggtggagagtggttgttttactggggacaaaaacaactgtgatgccagcattctcaggcactctctgtgttcagagagagagtggtccccctgtgggctctctgcgagtgtgcatacacggacacataagcactgtgagctgtgtgcacgcgcacctgtacaccctgtgtgagcgctgt

SEQ ID NO: 1058 - protein, 111 aa, Homo sapiens
RPRQGVTGHRPPRSGHLGAGTASRGLDGEGRTPPPPPAPQKPEAASTRAVAGPAPAGDALWGRPAGGIALASYCLPVAAGGTWGRPGWGRRMNSGRSWMPPPRWKGRRPGP

SEQ ID NO: 1059 - DNA, 987 bp, Homo sapiens
ttttttttttttcaaacaaaaatatttattttaattaaacaatttcttggtattgttcaaaacattaatcaagcaattatctcataagactttttttctttacaaaggaaaatttccaattttggttttaaaaaaggcaaaccagtaagctacattagagatcagatataatatacagcctatgcagccacatgagaaatagtttttgctgctttgttattacacaggtagttgcttccttcagctaaagcctggagtattgtatttcttttatgcatattgggtttggttctattacttggcaggagattgtactcccctgagtcagctgtgttcattggtcagaataaattccagcatctgacaccaattccattaatcacagacaagcttgaataagtgtaagataatagaaaaaaatatctagtgaatggcgaacattgtctatgtatgtatgctattcagtaatacagtagaagagatctgagatattgagttcaagatatatgaaactgtctatcaaaaaggataaaagtcctcctacatgaaatactttaattcaggcaaaaggtgtatgaaccaagtaaatctccaccctgaaagaacttaaatttccatgtgaagccatctttatttccttctttatttccaaataattggccacttagaataagtgtggacatttcatgatcgacaatatcaatacagcccaaaccctgatttctatgattaaaaataataattttaaatcactttctcaataaatagaatattacatttcaacacaaagtctaacaatttagaagctgctctacacaatgtgcagctagctgtagtctctttgaagaaaatgactttttatcattacacacatttatgtttatattatggcccacagaagggcagattagactgaaatctgtgtgatgctccttctactacttattgaatagtgtgtagggttacaatcatttgtttacaccccag

SEQ ID NO: 1060 - protein, 52 aa, Homo sapiens [sequence omitted]

SEQ ID NO: 1061 - DNA, 1189 bp, Homo sapiens
ctttattttcagcatagcaaataaatattagacctgttccaatttgatctacaatttttttctgtgtttttcaccagattgtactcctaaaacttaacaggccatcacaagcaattgtcttttgtttacaagattgatttaatatgagaggatacaaaatgtcatcgttatcctctcttatgaacaactgtagtcaaaataaggtggcacaatttaattgttttgtatcagaaatacactgacccaccttttattgagtcctgccacatgttaggtaccgtgctctgctgtggagacagagcagtgaccccaaggagctcacggtccctgaaggaggtgctagagaagagacttagcttctgatactgccaatttaatgtgagaacatggggtatactgcatcatttccattttcatcaataacatatgttttatgcaccttctttacctgaaacttactaagaatctaccagtaaacaaacatcctgtctttttgcaagtatgaatcacttaacctgctgatagttgaagaacactttaggagttttgtattcttgtatatagtttattttttccatgtgctagccaggtaaagattacacagttcttctggactgttaaattgtgcatggttttggaccccttctgctctactacagagagtgaagaagaaagtattaaagctcactttaccattccatatacttactaaaagcctgtgtaaacatgtcttaatgaatgttgttgaaagcaatgtaaatagttgaaaatataaatttatattacagtttaagaaaaccttatgaggcatcactagccactgttaatatctatttgtattcttataccttttcaatatatttgaacaaatatagtttctggcactatttttatactaggaaaaggagttactatgtatattatgcttagcttttaaggcattttaaataaccatgaatgttgatttcattactttcctttcctccatcacgagagtcatttcagatgactctttcatgacaaaatcactttaaaggaacacttacctccgattcctgtataaagtcatgagatggtcaaggtggttttccattgtgcaaattcttcacctgtcagtggtttcctcattttgccatgctttgtaaaaataaaaagaatgatcaagtaggtaaaaaaaaaaaaaaaaaaa

SEQ ID NO: 1062 - protein, 81 aa, Homo sapiens [sequence omitted]

SEQ ID NO: 1063 - DNA, 527 bp, Homo sapiens
  misc_feature (37)..(45): Wherein any n is one of a or t or c or g
gttcggtaattaccgcgtgtttcccgagaccccaganggganganggctggtgaaacggcttccctctgcggtctttccacaggggcgcggatcctgaggccgagctctgccagcttccctccccacccccattcggcctgggtatggcggcgaggccccgcacagagggactcccacttcgactggagaggtgggggcgacgccagattccagaggctggcgccgcgggggagggcggaggtcgcaggtctggccacaagtcggcgtggcagtcagctggaggctccgagagcggagatcccagtgcacccaccttacctcgcttacaccaaagcgccatctcgccgcccgggttgcgaaaaaccacgaccctcttaaactactgtagcaaccactaattccccctgggagcagctagagaggggcacttggaaaccttcacgagctcggtgcctgaaggtctctgaggctcttgccctcaagatctctcccattccgccccgattcccggaccactgacctgcgc

SEQ ID NO: 1064 - protein, 113 aa, Homo sapiens
  VARIANT (102): Wherein Xaa may be any one of Arg or His or Leu or Pro
MALWCKRGKVGALGSPLSEPPADCHADLWPDLRPPPSPAAPASGIWRRPHLSSRSGSPSVRGLAAIPRPNGGGEGSWQSSASGSAPLWKDRRGKPFHQPSSXLGSRETRGNYR

SEQ ID NO: 1065 - DNA, 451 bp, Homo sapiens
ctgggagtgaggagtttcaaggtgactgctttttagctccaggggagaaaggagggcacagtgcccaaggccatgccagggcaaggacgggccactggcccccgccggccgagtcaaccagaggcaaagccagattgagggttcccaggctgacaaatgtctgctgcctctgccacaggagagagaaggggaaagagggcaaaagaaacaaagacatcacgcgttgcaagtggctggacttttaaaaacctacctttgcctccagggttttctaggttactgtcaccccacttcctaaaaagtgtctcccccctcatcctatttaagacctgatgcagtctccccactggttctcccagggaaagaaaaggggaaatgttttgttgaaaataaaagggatgacaagaaagaaaggaaaaaaagctattgttttcatccctaatttataaaa

SEQ ID NO: 1066 - protein, 67 aa, Homo sapiens [sequence omitted]

SEQ ID NO: 1067 - DNA, 359 bp, Homo sapiens
caggcatcacagacctgaggcagtggcctccggagggcactggacagaaacagccatccaagtggctgagtggagggaccctgctcaagtgcagctgcagtggccggggtttccctcaggtagggatcggggcgccttgtcgccgccagcctgtggcgtccggtacagtcagcagagtgcagggtgcgggcaccaggaaagggggcgcaggggaacttccgcgggcctcgcgtttgcaaacttctcgcctgggcaggaggcggtcgtgggaaagaaggtggaagagcgagctttttggaactgtgcacgggacagattggacgcacacccctcgggaggcgcgaaggcatggaaaattt

SEQ ID NO: 1068 - protein, 116 aa, Homo sapiens
MPSRLPRGVRPICPVHSSKKLALPPSFPRPPPAQARSLQTRGPRKFPCAPFPGARTLHSADCTGRHRLAATRRPDPYLRETPATAAALEQGPSTQPLGWLFLSSALRRPLPQVCDA

SEQ ID NO: 1069 - DNA, 958 bp, Homo sapiens
tcgcctgcagttgaggctgtggtcgaatgcaattcccgcctgaaccctataaatacaactttgctaaagatggcggactgtgggggactgccccaggtagttcagcctgggaagctcaccgaggccttcaagtactttttgcagggaatgggctacataccatctgccagcatgactcggctcgcccgatcacgaacccactcaacctcgagtagcctcggctctggagaaagtcccttcagccggtctgtcaccagcaatcagtcagatggaactcaagaatcctgtgagtcccctgatgtcctggacagacaccagaccatggaggtgtcctgctaagcagatgctcctcccctggaccattgcaagtccatccttcaaatgaccactccataatataacatttcatccagtaaactggcctctactatctttaactcatgcatggccactgaacctctctctagtagcctggatttatcattctctctgcctgcccacccccttttttgtatagcccaagaaccacttccatgccatactgtaacattccaacatctttagctgatcagatctctccatatcctctcttgccagctttttcccgtgctcccccaactatgtatcagataagattctttgatcccgactctgtgtgtgcgagcacgcgtgtctgtgtttgtgtgtgcatagttctgtggttttagacacgctttcttgtagtgcttctgcaaaaaacaaaaaagggacttattttgcattctcaatggtgtttttaagggaattaggcagaacagatttctaggttgggtaggccactgcattctcttttgtttgcaaattggtcaacaaaatttgcaaagtgatttcaggagagagcagctttgaggaatgtgggaaaatcataattgccgtctgggcccattgattgattgtgacccagtagcagaagggtgcc

SEQ ID NO: 1070 - protein, 112 aa, Homo sapiens
SPAVEAVVECNSRLNPINTTLLKMADCGGLPQVVQPGKLTEAFKYFLQGMGYIPSASMTRLARSRTHSTSSSLGSGESPFSRSVTSNQSDGTQESCESPDVLDRHQTMEVSC

SEQ ID NO: 1071 - DNA, 1719 bp, Homo sapiens
tacaagcgtcttgaattactctggtagcttttccagaaagacccatgacttcaccacatttctcgagttacgatgaaggtcctctggatgtcagcatggcagccacaaacctggagaaccagctgcacagcgcacagaagaacctcctgttccttcagcgggagcatgccagcacgctcaaggggctgcactccgagatcaggcggctgcagcagcactgcacagatttaacatatgagctgacagtcaaaagttcggaacagacaggagacgggacttctaaaagcagtgaattaaagaaaagatgtgaagagctggaagcccaactgaaagtgaaagagaacgaaaatgctgagttgttgaaagaactggagcagaaaaacgcgatgatcacagtgctggagaacaccatcaaggagcgagagaagaagtacctggaggagctgaaggccaagagtcacaagctgaccctgctgtctagcgagctggagcagcgggccagcaccatcgcctacctgacctcccagctgcacgccgccaagaagaagctcatgagctccagcgggacctcagatgccaccgtcagggagccccgtgctggccagctacaagccagcgccccccaaagacaagctacccgaaacgcctcgccgccgcatgaaaaagagctctcagcccccttgcacccggaatttgaagaggtctacagattcggggcagagagcaggaaactccttttgcgggaaccagtggatgctatgcccgaccccaccccatttctgctggctagggagtccgccgaggtccacctcatcaaagagaggcccctcgtcatcccccccatcgcctccgccgaagcggcgagcagcacagcccggcccgcgaaaagccgcacaaggcccacgtcggggtggcacatcggatccaccacgccaccccgccgcaggcccagcccgaggtgaagaccctggcggtcgaccaggtgaacggaggcaaggtggtgaggaagcactcagggacggacagaactgtgtgaaagcccgccgtgccccaccccgcgctgtccatgcactgtgagcaccactgggaaatctcagccacaccttttctgtttaatcccatgcatgccaaacacttttcacacctaccgacccattctccttctgcttctcttgccctcttcttcacgccaaaatatgatcgtgtccctgccgcagaatatgtatttcctaattgctgtggccaaacgcctgtgtgccgaatcgcttgcttctgatcccgctccgtgtaacctaagtgcgctgcaggcaaagcccaggccacggctgcgtcactactgatgttcacgatgccacacagtcacacacctaattcattctcaagtcggagcaacacataccaaccttgaccttatcctcaagctccagggcagcctggccgagcagcccctgctccctcctggagacccttgtcacctcccgagctcctcctggagacccctgtcacctcctgaccaacctttcccagggcggcaccgatcaccgagcagccgtgcgtgtatctcaaggaactaaataagatgacgctactcctcatagcaccacaacctgaatgtgtgttcatatttttttgttagttttatccaaaatgtttaagatcccaacaaactttattttctaaacctgcaaaaaaaaaaaaaaaaaaaaaaaaaaaaaaaaa

SEQ ID NO: 1072 - protein, 173 aa, Homo sapiens
APAGPQMPPSGSPVLASYKPAPPKDKLPETPRRRMKKSSQPPCTRNLKRSTDSGQRAGNSFCGNQWMLCPTPPHFCWLGSPPRSTSSKRGPSSSPPSPPPKRRAAQPGPRKAAQGPRRGGTSDPPRHPAAGPARGEDPGGRPGERRQGGEEALRDGQNCVKARRAPPRAVHAL

SEQ ID NO: 1073 - DNA, 439 bp, Homo sapiens
tgtaaacagctttcatataattcatgatagaatattactatgtgctttggaagacactgaggaaagacaaaaggtcattgggcagaaccaccctagattgactgttaaggccatcttctagtttgcaggacttgtggtagacagacagaataatatcctggacctcttgggtgtatacaggacaaactgaaataaactctcatttttagatcataatgtcatcatgaaacatatcaattcggtctatttctgaagaaaacaagcacaatgataaagtttgaatgtttgtctcctccaaatctcatgctgacatttgatccccaatgttgggaggtggggcgcactgggaggtgtttaggttacgggggcagatccctcatgaatggcttggtgctgtcttcatgggattatgttctcactcctacttcctgtgagatct

SEQ ID NO: 1074 - protein, 57 aa, Homo sapiens
MIKFECLSPPNLMLTFDPQCWEVGRTGRCLGYGGRSLMNGLVLSSWDYVLTPTSCEI

SEQ ID NO: 1075 - DNA, 527 bp, Homo sapiens
tttttttttttttgttggttcatcacaaccttttatttcacaatattaatagtaatcattatagctaccatgtattaagccttcaccatggggctgttaagtcttcattgcttagctttactaaactagataatgtgtttgcttatctcatggatttctcttaaccatcccctgagatccccctatagttcttatccctttacccccattttacagaagaggaaaactgaggctcagagaaggggagtcacttggccacagtcgcacagttggaaagtggtagagccaggatgagacgctaattctgactccaaagctagttatatataataatagcacccaagtaatgtatagattaccatgttttcacatatggcaaattaaggaatcagaatgaatgatgcatgctgcccaagctggacagaggatgggccagggcacaagtgacggctgacccactgatccatggaacccccaagaaaggctctagaacaaagctctgatttcacagtgagattaaaattctg

SEQ ID NO: 1076 - protein, 53 aa, Homo sapiens
MCLLISWISLNHPLRSPYSSYPFTPILQKRKTEAQRRGVTWPQSHSWKVVEPG

SEQ ID NO: 1077 - DNA, 420 bp, Homo sapiens
tgatcactctatccacccccctctgcagtgtacacgttaataatttcatatgccttttattaattctggtcattaatttaacctttttcttctttggggcccacgttgaaacctctattttcaacttctcttccagttaggtgtggccttttagctaagttcctgccaatggaacataaacacaagtaaagattgacatttccaggcctgggacataataactttccacgaaggatttttccatgttctttccccttgcagggcaaatgtagaagccacatttaggatggctaagccacaaagacagagggcatctaggttccagaaccactgctagaagaaagagggacctgctgatctagaataccctttttgaacctcatatccgcagaaaataaacttgtatttatcttaactagt

SEQ ID NO: 1078 - protein, 67 aa, Homo sapiens [sequence omitted]

SEQ ID NO: 1079 - DNA, 442 bp, Homo sapiens
gtcatcctgggggactctgtgcatagggcagtatacaagaccctggtgcttctgctgcagaaggaccgcctgctcactcccgggcagcttagagcaaggggggagctgaacttcgaacaagatgagctggtggacggaggccagcggggcaacatgcacaacggccttaactaccgtgaggtccgcgagttccgctccgaccaccatctggtacgtttttacttcctcacccgcgtgtactccgattacctccagaccatcttgaaagagctgcagtcgggcgagcacgcccccgacctggtcatcatgaattcctgcctctgggacatctccaggtatggtccgaactcctggagaagctacctggagaacctggagaacctgttccagtgcctgggccaggtgctgcccgagtcttgcctcctggtgtggaacacggccg

SEQ ID NO: 1080 - protein, 147 aa, Homo sapiens
VILGDSVHRAVYKTLVLLLQKDRLLTPGQLRARGELNFEQDELVDGGQRGNMHNGLNYREVREFRSDHHLVRFYFLTRVYSDYLQTILKELQSGEHAPDLVIMNSCLWDISRYGPNSWRSYLENLENLFQCLGQVLPESCLLVWNTA

SEQ ID NO: 1081 - DNA, 393 bp, Homo sapiens
  misc_feature (1): Wherein any n is one of a or t or c or g
nagatcttgttgcggggtatgtgtgagcagagctactggaaccctctggaggatccaccgtgccagtcacctctggacgatcctctccgcaaaggagcaaacacaaaaacctacactctcactcggagagcccgtgtctactcaggagagaacattttttgtcctcaagaaaatacggaagaagccctgttgttattgctgattagtgaatcaatggccaaccgggacgctgtgctgagcaggatacctgaacacaagagtgaccgcctcatcagtctgcagagtgcatctgtggtctatgacttactcaccattgctcttggaagaagaggccagtatgagatgctgtcagagtgcctagaaagagccatgaagtttgcctttgaggaattc

SEQ ID NO: 1082 - protein, 131 aa, Homo sapiens
  VARIANT (1): Wherein Xaa may be any one of Gln or Lys or Glu
XILLRGMCEQSYWNPLEDPPCQSPLDDPLRKGANTKTYTLTRRARVYSGENIFCPQENTEEALLLLLISESMANRDAVLSRIPEHKSDRLISLQSASVVYDLLTIALGRRGQYEMLSECLERAMKFAFEEF

SEQ ID NO: 1083 - DNA, 318 bp, Homo sapiens
agatctgagaattctagaattatccgggctatatgtgcactgttaaattctggaggtggtgtgatcaaagcagagattgatgataaaacctatagttaccaatgccatgggctgggacaggatttggaaacttcttttcaaaagctccttccttcaggttcacagaaataccttgactacatgcagcaggggcacaatctcctgatttttgtgaagtcatggagcccagatgttttcagccttccactaaggatttgcagcttgcgctccaatttgtatcggagagatgtgacttctgctatcaacttgagtgctagc

SEQ ID NO: 1084 - protein, 106 aa, Homo sapiens
RSENSRIIRAICALLNSGGGVIKAEIDDKTYSYQCHGLGQDLETSFQKLLPSGSQKYLDYMQQGHNLLIFVKSWSPDVFSLPLRICSLRSNLYRRDVTSAINLSAS

SEQ ID NO: 1085 - DNA, 451 bp, Homo sapiens
  misc_feature (429): Wherein n is one of a or t or c or g
gaattcattttaccagtacatagtattactcttagaacataaattagatatcacgtggtatcaagagctgtgctttcttttgagtctagggcctgctttttgactttacagcaaaaagataagaaatgtactcatgacatgtcagacaagacaatgtgaggcactttgtggggagaccattagatgatcccccttgcctgctcttgcagacatagtactagttattccttatcaaaagtttgcatttcattcatattaaatattatctggacagtttcattttttctatttggctcttcccttactgtgccttcctgcattattggcagggttcataatccttgagaacattgtttgatttaaaatattttttatttgaaatgagactgatttctattcaaatccagtggctgggagtaagaagttatntccctagaaacttatgtttctg

SEQ ID NO: 1086 - protein, 53 aa, Homo sapiens
MIPLACSCRHSTSYSLSKVCISFILNIIWTVSFFLFGSSLTVPSCIIGRVHNP

SEQ ID NO: 1087 - DNA, 425 bp, Homo sapiens
gctagcacccctgagttctggctgctctgctgaggggcagggccaccatttatcaccctcagaaatctgagccgcaagtgtggaaccatctcaccactcaagctggggctcatgctcccgcagggtggtgtgggaaaggcggtgtgccgtgaaggccaagggccaggttatgggctgtcccagggctcgagctgcttctccagcagctcctagccatgaaaccacaaacactttgcctcccccttctgagtcttggtgccctcatccataatacggttacaatatatacctcacaggcttgttgttgtgaggttcaaactaaatcctttataaaatgtccctgaaacattgtaggtatgcaacaaatgttggctatctcccccttagtaaaaatccgacttcatgtgcactcagaacattctgtg

SEQ ID NO: 1088 - protein, 51 aa, Homo sapiens
MRAPRLRRGRQSVCGFMARSCWRSSSSPGTAHNLALGLHGTPPFPHHPAGA

SEQ ID NO: 1089 - DNA, 259 bp, Homo sapiens
ctcgagatggagaatgaaataggaatccaacaggactaagtttgttgaatttagtctttccagggaggaagaggaagctgtcttcctaagggctcctggtggatatttgctgtccggctcctggggacgcccccgccctgcagcagccgggaccatttgatcgccctgcgggtgagcgtgaccaggtagctggagaaaaacttctcgtaggcggcgtcgtcgaagtcctcaggccgctcgaatccgtacgggtcgatcg

SEQ ID NO: 1090 - protein, 52 aa, Homo sapiens
MVPAAAGRGRPQEPDSKYPPGALRKTASSSSLERLNSTNLVLLDSYFILHLE

SEQ ID NO: 1091 - DNA, 549 bp, Homo sapiens
ctggaatgcgtcccgtttgagctaatgcggttcaggacagtgtttgctgagaagaccttgcctttcacactcaggacggccacaagtgtcaatggggcagaggtggaggtgcagagctggctgaggatgtcaactggcttctccgccaatcgtgaccccctcactcaggttccctgtgagaatgtgatgatccgttaccctgtgcccagtgagtgggtgaaaaacttccgcagggaaagtgtcctgggggaaaagtctttgaaagccaaagtgaaccggggggcaagttttggctccactagtgtttctggctctgagcctgtcatgagagtaactctgggaactgccaagtacgagcatgccttcaactccattgtgtggaggataaaccgactgccggacaaaaactcagcttccggtcacccacactgtttcttttgccaccttgaactcggctctgaccgggaagtgccttccagatttgccaatcacgtgaatgtcgagttcagcatgcccacaacttctgcatccaaagccagcgtgagatct

SEQ ID NO: 1092 - protein, 183 aa, Homo sapiens
LECVPFELMRFRTVFAEKTLPFTLRTATSVNGAEVEVQSWLRMSTGFSANRDPLTQVPCENVMIRYPVPSEWVKNFRRESVLGEKSLKAKVNRGASFGSTSVSGSEPVMRVTLGTAKYEHAFNSIVWRINRLPDKNSASGHPHCFFCHLELGSDREVPSRFANHVNVEFSMPTTSASKASVRS

SEQ ID NO: 1093 - DNA, 343 bp, Homo sapiens
cctaggcccaagcagaggctattctcagccaggtctggaggcgcccctgtgatgatgctcagggcagaggcctccccatggtactctacctggcagatgtgctcgggggccacctaaggagtggaggaggccccgggtgccccccaccctcctcttagactggagatacaattgagacgcactgagcagggatctcagtgggcctaagaaaaaaggctggctgcacatttgtgtagcaactgagaaagaagcagaatgtaacttcccagacttaaaggccccacactaactctagtccccatgaagcggaattcttcctttccctcacattctgaaagctacc

SEQ ID NO: 1094 - protein, 67 aa, Homo sapiens
MCSQPFFLGPLRSLLSASQLYLQSKRRVGGTRGLLHSLGGPRAHLPGRVPWGGLCPEHHHRGASRPG

SEQ ID NO: 1095 - DNA, 411 bp, Homo sapiens
  misc_feature (336)..(359): Wherein any n is one of a or t or c or g
tgatcaaatggtctataattttgttgatccccatttttcatgattctgtatttgcaaatgtgcccacttgccaaaatttatttgtaaccccaaaatcaatacttgcggcagcactttcatggtcatttgcagactttacttgtaccctgaaaatcaatatttgcagcactctcgtggtcattaacaggcatacactgagggataaaaaatttgaattgcctaatgcatacatggccagctgaggtagaacagctaattctatgctttcttattccagctcacagactgaataaacaagtggtctatttagggccacttttttgcatcctatgcttnttgttggtgatntcactgtntanaatagcccccagcatagtgaagtgccatctagtgttttctaaaagcagaggg

SEQ ID NO: 1096 - protein, 64 aa, Homo sapiens [sequence omitted]

SEQ ID NO: 1097 - DNA, 401 bp, Homo sapiens
ggagagtgtgtttaccgaggagatgtggctgtgtgtgcggtgactagaagtagtcttgattcaccacggataggggaagggctaccgagtggagggctcagagatagcttttggatatctgaaacctcggggagttctaatttaagtccactttgtcctctttctgtaagtcaggttgtggacaatgaagccctgtatttcttccaatggtttaattagaaaaagttgcctatagtcgcttaccatcagcttgctgttttgaaattgtgtgtctacacctaacacccaatttaaaatcccactaacaaagcacaaaggcctgctatggaccaacatactctaaggaccagatcacgtgctctgtttatatgatgaacaatatacatttatcctcttataat

SEQ ID NO: 1098 - protein, 64 aa, Homo sapiens
MLVHSRPLCFVSGILNWVLGVDTQFQNSKLMVSDYRQLFLIKPLEEIQGFIVHNLTYRKRTKWT

SEQ ID NO: 1099 - DNA, 443 bp, Homo sapiens
  misc_feature (420)..(433): wherein any n is one of a or t or c or g
gtgcacgacacagttgatttagcgtccccaagggaaaaaaaagacccacccagcccccttcaactatagtataacttttccatgcacacccaaattcccccacacaagcacgcccacaatgtgtaataaaatggcacgtgtgcaggctggacgcacccaacgcagattccccacgatacctcacgtggggccgagaactccatgcattactcactgtggttttttgcttattctctgcagtgtcatgtaaaaatattactgaaaatgtcgaaaaggcctgcagatccccctatgtgtaacagtgatcagaaaaagaggaataatttatgtttatcaatagcacaaacagtcaacttgttggaggaactgaacagcagtataagtgtgaagcgtcttacagaagagtatgatgttgggatnaccaccatacatnacctgaacaa

SEQ ID NO: 1100 - protein, 80 aa, Homo sapiens
  Variant (73): wherein Xaa may be any one of Ile or Met
  Variant (78): wherein Xaa may be any one of Asn or Asp or His or Tyr
MHYSLWFFAYSLQCHVKILLKMSKRPADPPMCNSDQKKRNNLCLSIAQTVNLLEELNSSISVKRLTEEYDVGXTTIHXLN

SEQ ID NO: 1101 - DNA, 403 bp, Homo sapiens
  misc_feature (238): Wherein n is one of a or t or c or g
gatctcaaaactgctgatcagggccccgcgctccacatcccaagtcagcacggctgcatctctggctctctgaagcctccacgaggatatggagggtccaatgagggtgatctggtcaccgccagcacccagcgccccactgcacagcacggagtaatttcccaggtcccaatccaggctgaagttgccgatgtggagtttccgcccatcttgactgagccgcaggcgactcccgccntcctggagccaggggcctcccttcccgggcccaggatgcccgtgagggtgggggacaaccagaggcctccagtgccacctctgcctcccccaaccgtgtctctgccaccaacggatgcagcagcacctctcggggggcctccggcgtgactgtgcaggtacgcgt

SEQ ID NO: 1102 - protein, 128 aa, Homo sapiens
  Variant (80): wherein Xaa may be any one of Ile or Leu or Phe or Val
DLKTADQGPALHIPSQHGCISGSLKPPRGYGGSNEGDLVTASTQRPTAQHGVISQVPIQAEVADVEFPPILTEPQATPAXLEPGASLPGPRMPVRVGDNQRPPVPPLPPPTVSLPPTDAAAPLGGPPA

SEQ ID NO: 1103 - DNA, 398 bp, Homo sapiens
gctagcagtgggggaagccattacttcctcccaactccctaacctaaggctcaaggaaaaagagcaactgttgcaacccagagagcttagccatctagggaggtcttctgaaaagagcagtggccttcagaagaaggatgcagccaaccagaaactaagaatccaagtgtaaatttacagacgtcaatgttgctgtctaccattgcccaacagtttgatgcagattcctaccaaatgcctactgacctggatcattgtgtttatctgagagtagggatctggcctgtcttgttcattgctgcatccccagcatctgctgcaatgtgatgtttccatgccttcccagaatttcaagaaataaattgtaatgatcttcatggaaatgttactggtcgtga

SEQ ID NO: 1104 - protein, 64 aa, Homo sapiens
MKIITIYFLKFWEGMETSHCSRCWGCSNEQDRPDPYSQINTMIQVSRHLVGICIKLLGNGRQQH

SEQ ID NO: 1105 - DNA, 412 bp, Homo sapiens
  misc_feature (1): Wherein n is one of a or t or c or g
nctatattatcttggcagccccaaatgcaatcatgtgtatctttttaagagagaggcagagggagtttggggacaaacacatacagaggacaaggcgatgtgatgatagaggcagagattggagtgatgtggccatctgtgaggaatgtcaggagtccgctttggatgaagcggggaaggaccctttcccataaccttcatagggagtatggccctgccgattccttgattctggacttcttacctccagaactgtgggagaataaatttctgccgtttaaagccatcaagtaggtggtagtttctgacagcagatagaggagagtcattcacagagtaaacttctgcactgatctggccgggagaggatgcagacagcacaattccatttctggatcgctgcatggatatt

SEQ ID NO: 1106 - protein, 63 aa, Homo sapiens
MIEAEIGVMWPSVRNVRSPLWMKRGRTLSHNLHREYGPADSLILDFLPPELWENKFLPFKAIK

SEQ ID NO: 1107 - DNA, 404 bp, Homo sapiens
gaattcaactgtaagtcagaggacaagggatctgtggaagcagtccatgcaggttggcctcttgaggttcaaatcaggaaggaaaagggtggagagtaggtctggaagggccaacagaaatgatctagcacaggaagccacctctccccaaatctcagtccacgcgatttgtgaggagctgtcagaatgttccatgccccttctcaggagagtggtttagtgatgcacgggtaacacaagttagaccaatgggatgtagtcctgggacttttgttgacagcatcagggaaaagaaactccctttctgctggaaagggtgtgatctgaaattgtaagcagccattctgccatctcatggggaaaaggaagccttgtgctagctccagctcagctacctgcggccg

SEQ ID NO: 1108 - protein, 59 aa, Homo sapiens
MEHSDSSSQIAWTEIWGEVASCARSFLLALPDLLSTLFLPDLNLKRPTCMDCFHRSLVL

SEQ ID NO: 1109 - DNA, 429 bp, Homo sapiens
  misc_feature (429): Wherein n is one of a or t or c or g
ggatccctatcacacaaaggccagatctaaatggacaaaggacttaaatttgagatgcaaatatttaaaaatcttttagaagaaaatataagagggtaacttattacatgccacacctactatgtgtactttgtacgatgcaagtgttggatatgagtgtagtatgtaagtgtagatgcctctaagcagtatatgcatgcttgctactttacacacgtgaaacactgggaatgggagcatgagaggaaaccctaggtcattctggtctccagactgctgctcctgcccacccccggttccagcactcccttccccattctcctatccagatcctctgttccaggcacagccacttacagcagctcaagccagtggcacccacggagaggccctcttcaccctactgctgggctgtcatgtcccctttcn

SEQ ID NO: 1110 - protein, 63 aa, Homo sapiens
MRGNPRSFWSPDCCSCPPPVPALPSPFSYPDPLFQAQPLTAAQASGTHGEALFTLLLGCHVPF

SEQ ID NO: 1111 - DNA, 440 bp, Homo sapiens
  misc_feature (1)..(440): Wherein any n is one of a or t or c or g
ncaaatatctcgccgtttgtatttggtaggacagcggccgtaggcactgggtgcccaggtccctcgcttcccgcgctcggcggggcctggggcccccagagggcggggagggcagagggctctggcggccatgccaccgcgcgggagacccggagagctggctaacccggctgagcgttcgcctggcttccgcggctcttccgcgtcttcggctctcaaacaggggaaactcgggcattgagctctcaagaataagaaccccaactctgcttcctgactgtggtaggattcgcgcaaactgaagattcgaagggtttccagaacttctggtccctctccctcgccgcctttcctaggtttggaatgtctcgagggaggttagagacctgggcatgaagaaactgtcggtttaaccgggggccgggtttacgaatgccctn

SEQ ID NO: 1112 - protein, 79 aa, Homo sapiens
MPEFPLFESRRRGRAAEARRTLSRVSQLSGSPARWHGRQSPLPSPPSGGPRPRRAREARDLGTQCLRPLSYQIQTARYL

SEQ ID NO: 1113 - DNA, 437 bp, Homo sapiens
  misc_feature (437): Wherein n is one of a or t or c or g
acgcgtgaatttgctacgggatttggaggagggaaaggcactgtttccatacctcagtggttttctcatctgtaaaataagtatgtgattgcatggattgacttacatgatgaatataaagttgttcattagtacagtacctgtcatattaagtactcaataaatgctagttattattaatgctgtgttgtaggtgttcagtaaatagttgccataatgcttaaagcagacataacttgtttttatttttgcaataaagatgatgccaactttttggtttaatggaaatgctttgaatctttgatattgttgtaatatagtggcaaagaattttgaatcccagcttctggagctcatatcttgattctgcgagttacttcgctatgttactttgggggaagttattaatctctctgtgcctcagtttcctcagtcgn

SEQ ID NO: 1114 - protein, 66 aa, Homo sapiens
MSSRSWDSKFFATILQQYQRFKAFPLNQKVGIIFIAKIKTSYVCFKHYGNYLLNTYNTALIITSIY

SEQ ID NO: 1115 - DNA, 464 bp, Homo sapiens
  misc_feature (1): Wherein n is one of a or t or c or g
nagattttacatagatggaattggtctttggtgtctttaagaacagtcaatcagggcaggggcactaataaaggattataaaatgctaaggaggatgggagttgaggtgggtcagtgctgtgttaaatataacccattatactgaggttagtaacttttttttcaagagttatagaagggcaagaacagaaagagatgaggtattgctcaaaatggcatggatgagactgatattgctcatggtgtctgagatttcctttccccattggcactctacttgactatgcaccttagccttcttgcatctaggtgtggcaatgtgattatttttggccaatgtattgatgtgaacagaagaaatatgcatgacttactctcctgggccataaaactgcccactgaagattccccattttatctttccccatactgcaacagaatggagaggaatacaagggcccaga

SEQ ID NO: 1116 - protein, 65 aa, Homo sapiens [sequence omitted]

SEQ ID NO: 1117 - DNA, 406 bp, Homo sapiens
gggcccacagatgttaatcagagcagccggcgctcagctccgccctctcgggacgccccgcccctcctcccatcctccctgcccgcgcgcagtgactgcaggctccggcgcaaaatcctgcgggagagggggtggggcaaccctctggaggcagcgcgcccgcgggcagcctcgttgtggctccttgggctctgttggcggcggcgctagcttcggagtctcccgcgcgcacctcagccgcctcctagcggcgcggcgctcgctcctacggtaagagcggcatcacctccgcgctcgggtgggcagtgtggaggtcgtcgagttctgacagaatttcgaggatggatcgggacgagggaggagagcggtcgtcgggatggaggtgggggctccggggccaacgcgt

SEQ ID NO: 1118 - protein, 87 aa, Homo sapiens
MLIRAAGAQLRPLGTPRPSSHPPCPRAVTAGSGAKSCGRGGGATLWRQRARGQPRCGSLGSVGGGASFGVSRAHLSRLLAARRSLLR

SEQ ID NO: 1119 - DNA, 363 bp, Homo sapiens
  misc_feature (363): Wherein n is one of a or t or c or g
tgatcactgaattctccagtccctggggacctttagccctctacctgggaaggcctctgggtagcagaattggactttcaggagaggtggggctggagacagagatgtgggccatcagagcaatggggtgtttacagcaatgaggccatagtgttcccaagggaaaagggcttaggatggagccctggccatcaccacttaaagctggctcaaggaagatgagcaaagagtggcctgaaaaggagtggcctgggagggaggagatggcttcctgtgtgggatcacagctgtggggagagcatgcccagcaggggtatgggtggggggcctgctgcacagggcctagggagaggaggtctgaan

SEQ ID NO: 1120 - protein, 62 aa, Homo sapiens
MEPWPSPLKAGSRKMSKEWPEKEWPGREEMASCVGSQLWGEHAQQGYGWGACCTGPRERRSE

SEQ ID NO: 1121 - DNA, 207 bp, Homo sapiens
attgactgtgagatggtgggcacgggaccaaaggggcatgttagttccttggctcgatgtagcattgtcaactacaacggagatgtgctttatgacgagtacattcttcccccctgccacattgtggactaccgaaccaggtggagtggtatccggaagcagcacatggtgaatgccacacccttcaagattgctcgaggccagatc

SEQ ID NO: 1122 - protein, 69 aa, Homo sapiens
IDCEMVGTGPKGHVSSLARCSIVNYNGDVLYDEYILPPCHIVDYRTRWSGIRKQHMVNATPFKIARGQI

SEQ ID NO: 1123 - DNA, 324 bp, Homo sapiens
  misc_feature (324): Wherein n is one of a or t or c or g
ccgcggctagaacaacgcttgacactagttgaccttggctgaatgaatgagtgaatgaatgagcaagagtttgctcaggctgaactctgagctgccggaagcctttgtagacacccccagaacatgctggccccacctctgagctcctggtgtacctcggttctcatgaggcccccgcacttcagcctctggtgatcctctttttcgagccagacatgttggctcagcaaacactccctgagcccacatcatgagtcaccagaggcccttgacccttcctcccacaaccttcccccactgcgcccgctctcaccctggtcacan

SEQ ID NO: 1124 - protein, 75 aa, Homo sapiens
MMWAQGVFAEPTCLARKRGSPEAEVRGPHENRGTPGAQRWGQHVLGVSTKASGSSEFSLSKLLLIHSLIHSAKVN

SEQ ID NO: 1125 - DNA, 418 bp, Homo sapiens
  misc_feature (1): Wherein n is one of a or t or c or g
ncgagtccttaggtcatcctagctgtcccttccccacctccccacccagcatccattcagtgtcaagctgtgcagctctcatctccataacgttccttgtgccagatccctcctgcccaacccagaaccaccaccttgcgggaggctctcacatctgaacgtgagcagcatgaccgcctcctttagaccttccacccctggtctggcagcctcagattcactgccccaggatcctcacactctgaccccatctgcctctctaggtagaatgcaggggactagatggggagccagtctggttgggggatcaggagacttctgtgaggaagtgcctattgagatgacctctgcaagatagtaggaggtggttaggcaaagacctgtggggtggcagagggcagagcagcaagcattacag

SEQ ID NO: 1126 - protein, 62 aa, Homo sapiens
MTASFRPSTPGLAASDSLPQDPHTLTPSASLGRMQGTRWGASLVGGSGDFCEEVPIEMTSAR

SEQ ID NO: 1127 - DNA, 1102 bp, Homo sapiens
tttttttttttttttttttttagtttttctagctggcaatccttttattccttcaagttgaaagcacttgtaactttacatacagataaaataaattatatagaaacagaaattccaaattaaataacaaaagtacaaggataaaaagcattagctaaaatttttttaatggtaaatactacctttatttaaaaaagttatacatgctagaaaaaagcataaatgatatatgtaaacaattgtttactcaatactttttttccttgaaaaaggtgcaaatgatctttaaatgtaaacacaaagttgccaaacatttttgtagttggggaaagggagaaggaggttattccttttaaatgcagttagtcttattcaaagatttttcttgcaaaatatattgaaaaaaatttgtctatgaatacaatgaggaaaaaaaactttaaccattgaaattattttttccttaaaaatttttaactttttaccagaaagtgcaatttgagagaagtagtaacaatgaccttatagaatgaagataatgatacattgtttgtataaaagaaccaagatattaataaaatgcctcaattgattttacactctttaatgtgtgctattacattaactgaataattcattcccttggaggctgttattaaaggtaagcctcagcttaaccaggcctgagcatcaagaataaattgcataacagaattcactgctgggagaagacatttctccctgctggtccttggtagcaataaggaaacaggaaggacagttgctttagtcagtaacatttttgagcaaaaactgttgcagagctgcatgtgattctcttggattctcaagacagcatatgagacttatatattgtttttataagaggcactgagcagagctctagatctagcagaaactctatgagaatattatgaaaaaaagactaaataaacaagttcatatagaaagaaacaagacataaaattacactgatgaaaactgtagtgtctgagtcctggtttttattgatttagtatcccttctgaattgtactatttaaaatgagatgttgccttttcttgtttttttgttttttttt

SEQ ID NO: 1128 - protein, 53 aa, Homo sapiens
MQLCNSFCSKMLLTKATVLPVSLLLPRTSREKCLLPAVNSVMQFILDAQAWLS

SEQ ID NO: 1129 - DNA, 1253 bp, Homo sapiens
attcctgtggtgagaaggaaagctacaggacctggagaaggggatgcagaggcaggcctgctgaccaacttgttgcaatcacaaaggtgggggtcctggtgcaggcagtgaacaggcttctaatgtgtggttcagtagtgccagcaagtgggggaaactttcagtattgcgctaggtcaacacttcctgctgcatttccttccctttgcacagcttgaagaaatagagtagacagaatcacacatcatgttgttggcagattgaaataagtacctgtagtgaacaagtttctactgtagttggagatcattagaattgaattcagtttctcttaggatataatcaggtataaacctaagttaaactttttcccaaacataggagcatccaaagacacagtgacttgagctatagatagtaaaaatcatacgagagttgaactgagtcaggtttaggaagcaagtttggttgcatcaattaagcaggctcttttcaattgactgatgctggggccttcagttttattctcagtatagattgccagtattgttaagagtatccaaaggcctttctagatggagacagaataactgacttgaacatacagtgtgcctgtaagtgtccaggctcagagctggtgaaaacccttctgttgggcgtgtgcagggttaaactcctgaagtaacttgtgaggacttcagtgcttgctggtgtcctgggcagcaccatgaatgcctttaccaagacatgccaagttggatcccccgaatgaagcagatgtggctgtggtgtgacccttgctccctgctacacagagcatcgcagggctggcctgtgtggtttccagatgagggtctgggtcccggaagcttgtgttgagagctcagtggacccaccccgcttgctgaaccctcacagttcttggggttgtccagcctggacttgtagcacacatgtcctgaagcaaagctccggtgactgcatgagccacctggccacagtcctcccatggagggcctgccgtgacgctcagtggagagggcagggcctgtgtctccacttaggccacacagtgatgaggaaaccacagatggagcttcttgccgataatactgactctagcccatgattgccttgcccaagccaaagaggaaggttaggttggcttgtcgagcccttgagcgttgggagatggggtggaagaagtgagccctgcagagatttgtatgtcctcagaatgaaagaggggcaaa

SEQ ID NO: 1130 - protein, 93 aa, Homo sapiens
MRVWVPEACVESSVDPPRLLNPHSSWGCPAWTCSTHVLKQSSGDCMSHLATVLPWRACRDAQWRGQGLCLHLGHTVMRKPQMELLADNTDSSP

SEQ ID NO: 1131 - DNA, 627 bp, Homo sapiens
  misc_feature (526)..(604): Wherein any n is one of a or t or c or g
ttttttttggagctttgtataggggttgtttattcctatgatgaaagaattttagatacaattaattaaaaaaaatttccctagctgtccctcccccaacctatgttaagagtacaaattgccagtggagcagcagcagagcactgcattaatggagacctgggcctggcatcgtgctggggtctcagaagcacatggccattcctgtcttcatttctaaaagactgtaaaaccatcccaaaatttggcaccatggggactattggcaattcgaactcgagctagctagggagtctaggaagccttgggtgacaattccaaagctttggcagtgctgcttagggaagcttcacatgcaaacatctcaaatcaatttccctaatggctagattcagcattcccaggtccctggggagcagccagtgtaccatagggcacccccaggagtgatgtctgcacatccccaacagctggaaaagggctagggagagagagctccagaaggaagggaacaaaatactctgantttagatataactatcctaacaactattactgaaactgctacagttttgcctataacttctatcttttgaaaatctancagccatagtacgggggaaagag

SEQ ID NO: 1132 - protein, 60 aa, Homo sapiens
MLRVQIASGAAAEHCINGDLGLASCWGLRSTWPFLSSFLKDCKTIPKFGTMGTIGNSNSS

SEQ ID NO: 1133 - DNA, 439 bp, Homo sapiens
  misc_feature (411)..(422): Wherein any n is one of a or t or c or g
aaaacggtacaaggtttaattaccagggaaataaggggatctcaaatgtggaactggcacggctgccacactaacacgaagagaactgctagctacacagagattggaaaacccgcgggtacacaaagttatactggttacactacctgcgccgcgaccgcctctaggtaagcctctacgctacacggaagagaaaaggcccccacagatttaaacacctacaaccacgcggctggttctcaatagtcttcttcgagtttttgttcaagtctgggtcttctgactgattttccaatgtccaaggtgctgaaccgaatgcaatcaccattcaatgacagctcaacttccaaatttctttgaatttcttttaacagaacaatccaatatgaaaatcagaatctcttctgacgngtgggagatanaacgcagtcccggaagg

SEQ ID NO: 1134 - protein, 50 aa, Homo sapiens [sequence omitted]

SEQ ID NO: 1135 - DNA, 1029 bp, Homo sapiens
tcaggggcacacacattccagaacagttacatatcgtgtatttgaagaaggctcacacagccctggaaaccatgccactggccattccccatctgactcaggttacagatcccctcccttttcccactgaccactcactctcctctggccagatttgtttctgtttctctgaaagagcagttcccacaactgcatgaggcttttgatattggccggtgggtgaagagtacagagggatgttactatacttaatttgattcttcctctccccagcagccacatctgtccttggcttccattgagctttataatcagttgaaacttctgtgtcttctgacttgaacttctgtttggacagatctttctcaattgctgcaaatatgcacatgcatttgcatatgcatacacatacacacacatacgtgaagagcgttgtttctatccatgttacatctccttggaaattttagctaaaatttcccaattctgtgcactttgatttacctataaatctgatgaatttacccataaccaggtcagttataaaaatgtttagcatgtttccaaagacaagggtaagactatttttttaaaataagaaaaacattgtgctatataattgcaattactacattctatatgtaaatcgcttgctaaaactcttttaaaaagtgtttaaaattttcatttttgaaatgtgggccaactattccctttggaaacatgttgatgctgtctttttttcatgatccacagagagtaaagtggtgattggatttggtctctacttaaacatttaaaaaaataagtgtatcatagccaaacatgatctagttaccctctttattctaattgttccctcaaatcttatatgggctgtgtgactgctggctccttacatctaatctaaataaagaacaagaagggcattgcaacattgtggaaaaccctgtaacatgttttctcagctttcaggtatactagttccctgtccaacagtattaacattctgaaatccaataaaaaaaa

SEQ ID NO: 1136 - protein, 105 aa, Homo sapiens
MCVYVYAYANACAYLQQLRKICPNRSSSQKTQKFQLIIKLNGSQGQMWLLGRGRIKLSIVTSLCTLHPPANIKSLMQLWELLFQRNRNKSGQRRVSGQWEKGGDL

SEQ ID NO: 1137 - DNA, 702 bp, Homo sapiens
ccatctttattttttgagacctcgcaggccttgagcttgtcaccatctccctcagacagaccagtccgacgcgtggccatcatttcatttcaaatgacaaagaagggacaaatcctttggagtccacattggacgtggcggggaatgccaccacacacccgaaggggaagaattccacaagcaggctccgaggaggggcagggctgttgaaacagacaacgtgccagggaataaaggttttcaggaagcgccttcaaatgcctcgctgatttctcgtgacttcaactgacttcgccttcttcttccatttctggagacttaaaaacaaaggcgacaggtcttcttggcagccagtgtcgaggccaattgcagaaagcggtccccttctttaacttgcttaacaaatatggtatccattggttccaagcggtttctttgttttcctcctctgtttccattttcttcatccttatatgaaaattgaattgcagactctgggggataaacaataaaatgtcttaatgtaaaaccaaagccttgagatgttcttttcaacgtaactgttttgggacctggccaggagaatgtttcatcttcagacagtgatacagtttcactttgttcttttccatctttattttttgagacctcgcaggccttgagcttgtcaccatctccctcagacagaccagtccgacgcgt

SEQ ID NO: 1138 - protein, 61 aa, Homo sapiens
MKKMETEEENKETAWNQWIPYLLSKLKKGTAFCNWPRHWLPRRPVAFVFKSPEMEEEGEVS

SEQ ID NO: 1139 - DNA, 763 bp, Homo sapiens
  misc_feature (1)..(729): Wherein any n is one of a or t or c or g
nttttttttttttaatttataaagaaaagaggtttatttggcttgcagttctgcaagctgtacaggaagccgcccagcttctgatgagatgccacattcttttaaacaaccagttcttacatgaactcagagcaagggttcaccatttcccaccccagttcatctgtgggaggctgggagaggtctcaggctgggtccctctctcccctgcagtccttcttccacacggtgctggagaacagcctggcctgtgagaccctcgtggacaacaacctgcgggtcaccaactggaaccgcaagctgggctgcaagtgccagtacaagcacattgtggactggtgtggctgctcccccaacgacttcaagccacaggacttcctccggctgcagnncaagtctccagacccaccttcttcgcccggaagtttgaagccgtggtgaatcaggaaatcattgggcagctggactattacctgtacgggaactaccctgcaggtaccccgggcctgcgctcctactgggagaatgtctacgatgagcctgacggcatccacagcctgagcgacgtgacactcaccttgtaccactcctttgcccgcctgggtcttcgacgggccgagacgtccctgcacacggatggggagaacagctgccgatactacccaatgggccacccagcatctgtgcacctctacttccttgctgaccgcttccagggctttctgatcnaagcatcatgctaccaatctggctgtgagcaaac

SEQ ID NO: 1140 - protein, 106 aa, Homo sapiens
  VARIANT (91): Wherein Xaa may be any one of Ala or Arg or Asn or Asp or Cys or Gly or His or Ile or Leu or Phe or Pro or Ser or Thr or Tyr or Val
MNSEQGFTISHPSSSVGGWERSQAGSLSPLQSFFHTVLENSLACETLVDNNLRVTNWNRKLGCKCQYKHIVDWCGCSPNDFKPQDFLRLQXKSPDPPSSPGSLKPW

SEQ ID NO: 1141 - DNA, 944 bp, Homo sapiens
ttttttttttttttttttttttctgaaagtgtctgatttattttcaaaataaattatatcttgattcctttcaggttcatgtggcaccggtcaggctgcctcaaatgctatcacgattcaaggtttggggtgagtttccatgatcagtgtcctcgtccagcattagagaattgtgcctcctccatctagaggtctgcagagccacacagtctgcaggacaagcagggacactgcccaggtctccccgggccacctactccagggctggtctgagaaagctgagggcagggctttcgtcctctggctgaaatctagggtgcagtgctggtttgcttcctgggctccaaccctgctcacggaaaccgccgtttgctgggtgtctttgactctcatcttcttagaatttcagataaacacgcttccttcacaaatgccgacggtaaagtgacggtcactccacatagcaaatgcaaggttgccgttaacggggtgcccatcaccaccaggacaaagctgcagcatttggtaaactttcctgcaggctcacagaatgtcctaggtccccccccaagagctgggaggggacagtcatgtgaggtgcccacatcacagacgtggcaggatggggcgttcacaccagctcctctgccaccatggcttggggacaacatggcaccactgctggagggacaggcctgctcctgactcactgtgtggtcttgggcaagtcacttcactcctctgacctcacctgtacgtggggtttcttcggagtggggcagtgaggacctgagcaggttcgattacgacttcttccagctggagagggcggctgcggagggagcgagtgcagacaaactcggtgagccccctcctgactgctggcctctcccgtgtgctgatctgagagcagcgatttcacactgtgtctctctgctttccaa

SEQ ID NO: 1142 - protein, 93 aa, Homo sapiens
MLSPSHGGRGAGVNAPSCHVCDVGTSHDCPLPALGGGPRTFCEPAGKFTKCCSFVLVVMGTPLTATLHLLCGVTVTLPSAFVKEACLSEILRR

SEQ ID NO: 1143 - DNA, 700 bp, Homo sapiens
  misc_feature (500)..(688): Wherein any n is one of a or t or c or g
aaaatataaaacaatacttcattggctgtattacctagttgtatcgttaaaataagaacaaatacagtggaatggaatacttcatatgacttcatgtgaaaaatacttcattatacaataaacaaccctcatgcatttcaacattgccaccagtaacactaaagactcccagttctattcatatgtgatcatcactgccctacaccccaaccccagctcctccaagcttcaacaggcatcagtatttttcgtagcccctggcttattccatcatgcagccaatgtgggaatctagagattgacttccttggaaacagaggctctagagactaattcttattggctcagctatagacacgttggcagccagacacgttggcacactagtctcatggtactataagcattttttagaggtataaactcaaacagcacactcaagtgtcatttatctttgagtgataatttaacagttggcatttggtggccccacatagctnatgctaatctgaaagtgtccaactgaagtccacaggttaattgcacacttagcaggatatggtgtgatgatcagagaattctttgagattcaccagtgtaaanaatttagcaaaaatgtggctgggcatggtggctctcgcctgtcattggatcccttgagtccaggagttcaaggccagactgggcnacatggtaagac

SEQ ID NO: 1144 - protein, 54 aa, Homo sapiens [sequence omitted]

SEQ ID NO: 1145 - DNA, 461 bp, Homo sapiens
tttatactcttccagactgtccaggacggccggcagtttctaaagtatgttgaccccaagctgggagtcccactgccagagagagactacgggggaaactgcctcatctacgacccagacaatgagactgacccctttcacaacatctgggacaagttggatggctttgttcccgcgcactttcttggctggtacctgaagaccctgatgatccgagactggtggatgtgcatgatcatcagcgtgatgttcgagttcctggagtacagcctggagcaccagctgcccaacttcagcgagtgctggtgggatcactggatcatggacgtgctcgtctgcaacgggctgggcatctactgcggcatgaagacccttgagtgggctgttcccttgaagacgtacaagtgggcagggccttcttgggaacatttccgaccttacaaaggggcaagatgaagagg

SEQ ID NO: 1146 - protein, 151 aa, Homo sapiens
FILFQTVQDGRQFLKYVDPKLGVPLPERDYGGNCLIYDPDNETDPFHNIWDKLDGFVPAHFLGWYLKTLMIRDWWMCMIISVMFEFLEYSLEHQLPNFSECWWDHWIMDVLVCNGLGIYCGMKTLEWAVPLKTYKWAGPSWEHFRPYKGAR

SEQ ID NO: 1147 - DNA, 638 bp, Homo sapiens
  misc_feature (1)..(461): Wherein any n is one of a or t or c or g
nccatggtctgcactggtcttctctgagtattcttaggagcagaggcagccccaagttccaacttgcaagccctgtaactaagctgtctataaaccccagcagggaaggccaagggatggtctcacccatgcccttccctttggccaacatgagtcctgcagtggggagcttagcccctgctcccacctaacactctacagttagcacccaggggttgattcaggaagttcttcctttttctagcccgcatccttcctggccaccccctttatttctcagtctgacctggtgcactcttggcaagtgagtccattgcagtcccaggtggatatttaatgagcactcggactgtttcctccaagtcagctagtggcctgccctcctccttttcaggaagtctggggcacagagcctcctctggctgcctcttctcttctctgagcctctgggagccttcannggcaaaacctggcagttctcaggaacccagacctgaggctccagctcctcggccaccagagattcagtgtgcagtgccgaaggcagtcacccccaggcagttcctgctgtcaggccgcaagcctagagcgcaggatcccagcagcccagggaacagggccgcatgtgagctgctgcc

SEQ ID NO: 1148 - protein, 100 aa, Homo sapiens
  VARIANT (42): Wherein Xaa may be any one of Ala or Arg or Gln or Glu or Gly or Leu or Lys or Met or Pro or Ser or Thr or Trp or Val
MSTRTVSSKSASGLPSSFSGSLGHRASSGCLFSSLSLWEPSXAKPGSSQEPRPEAPAPRPPEIQCAVPKAVTPRQFLLSGRKPRAQDPSSPGNRAACELL

SEQ ID NO: 1149 - DNA, 1100 bp, Homo sapiens
  misc_feature (1)..(617): Wherein any n is one of a or t or c or g
ncgactttgcagatttctcttcccccaggcctccctcctccacctctccgccccctccgggcttggctctcccaggaggctacgactggagccactggtcccgcagatccccgcgtcctcggtcgccgcgtccacgtccctctcgcgtccccgcccggcgccacgccgcctcctctgggttcggcctccgcgcggtgcagcgcagtctcaggccgcgggacaagcccgacttaaatctctgcaatggctaacgaagcttatccttgtccgtgtgacattggccacagacttgagtatggagggctaggccgtgaagttcaagtcgagcacatcaaggcttatgtcaccaaatcccccgttgatgcaggcaaagctgtgattgtcattcaagatatatttggctggcagttgcccaataccagatatatagctgacatgatctcaggaaatggatacacaaccattgttccagacttctttgtagggcaagagccttgggacccctctggcgactggtctatcttccctgagtggctgaaaacaagaaatgcccagnaagatcgatagagagatcagtgctatcttgaagtatctgaaacaacagtgtcatgcccanngaaaattggcatcgtgggattctgctggggtggaactgctgtccatcatttgatgatgaaatactcagaattcagggcaggggtgtccgtctatggcatcgtcaaggattctgaagacatttacaatttaaagaaccccactttgttcatttttgctgaaaatgatgttgtgattccactcaaggacgtatctttgctgactcagaagttgaaagaccactgcaaagttgaatatcaaattaaaacattttctgggcagactcatgggttcgtgcatcggaagagagaagattgctcacctgcagacaagccctacattgacgaggccagaaggaatttaattgagtggctgaacaagtacatgtagcaagaatcaagggcaagccttcctagaatagctttcatcccaaaatttgcttggaaatagttagatcatttgatttaattttcacttttataaaataagtgtaggaatcctaaaaa

SEQ ID NO: 1150 - protein, 138 aa, Homo sapiens
  VARIANT (17): Wherein Xaa may be any one of Ala or Arg or Gln or Glu or Gly or Leu or Lys or Met or Pro or Ser or Thr or Trp or Val
RDQCYLEVSETTVSCPXKIGIVGFCWGGTAVHHLMMKYSEFRAGVSVYGIVKDSEDIYNLKNPTLFIFAENDVVIPLKDVSLLTQKLKDHCKVEYQIKTFSGQTHGFVHRKREDCSPADKPYIDEARRNLIEWLNKYM

SEQ ID NO: 1151 - DNA, 499 bp, Homo sapiens
tttttttgctcttcctttctgctagagtcctgaaaccctttcgcttctcattgtgggttcaccagcacgtggtcttcggacactgagagcaccttcgctctcagctgtgatcctagctagcccagacaccagtctgtacccaaaggaagagtaggaagttgcaaagggaagctggctaacaagggcttcttctgccctacttggcaaaggcccatacgggtggcctccgtggatatggagctccttcattttgttccaaaaagagctctgccaggctttaccattgccctggaggtgcacaggcgcccgtatactcgagcacaaccatgggctcaccccaagcgcgcacacctgcacccacgcgtaaggaagaaccacacagctatctctgtcggggaagaacacgaggagtgaagtgctttaggtggaaactcctcacatctcctttctttcctctgctccccttctctgcccctggtactccggatccaatccttgg

SEQ ID NO: 1152 - protein, 75 aa, Homo sapiens [sequence omitted]

SEQ ID NO: 1153 - DNA, 321 bp, Homo sapiens
  misc_feature (17)..(77): Wherein any n is one of a or t or c or g
aagatgcagcaggaatncactnttcagcaagtaatgtctcagattgcgaatgtgaaaaaggatatgattatttggangaagagtgaattttcagccctcagagcagaaaatgagaaaataaaactcgaactacatcagttaaaacaacaagtaatggatgaagtgatcaaagtccgaacagataccaaattagacttcaacctagaaaagagcagagtaaaagaattgcatgcccagcaagatcgggcccttacccagacagacaggaagatcgaaactgaggttgctggcctcaaaaccatgcttgagtcacacaagctt

SEQ ID NO: 1154 - protein, 107 aa, Homo sapiens
  VARIANT (6): Wherein Xaa may be any one of Cys or Phe or Ser or Tyr
  VARIANT (8): Wherein Xaa may be any one of Ile or Leu or Phe or Val
  VARIANT (26): Wherein Xaa may be any one of Arg or Lys or Met or Thr
KMQQEXTXQQVMSQIANVKKDMIIWXKSEFSALRAENEKIKLELHQLKQQVMDEVIKVRTDTKLDFNLEKSRVKELHAQQDRALTQTDRKIETEVAGLKTMLESHKL

SEQ ID NO: 1155 - DNA, 562 bp, Homo sapiens
cttcagaaatgggttaaagcagctgccaacatcaagtaatctgatttttcctgaggcttgtagcaaactcagtataaattcagggtttgtaaagctgaggttggttaaatgaccttcaagttgagaagactcatgcatatttaaggctggagtggtcttagtggcaagtacagctcttttttcatctttctcaagtgcttttctcttcccaccattttggaaatattctctgcatacactacaacaccattcaatacgaccttcgccctcacaagtttttgcccaatgattatctgccaaatttttcattgcaacggcatattcacaaagagtttcttcatcctcacagtgttctcgccagatcttatcaaaatctcccacttctcggtacttcttgcggagccgccggtggacgctcttcaccacaccggagagcttctcctgctccagtttccgctcctgctcccggggcggcggagtgttcggggacccggccctctgcgcacgagcagtatttcggccgccggcccctggctccatatcgcagccgccgcctcgtgcc

SEQ ID NO: 1156 - protein, 180 aa, Homo sapiens
MEPGAGGRNTARAQRAGSPNTPPPREQERKLEQEKLSGVVKSVHRRLRKKYREVGDFDKIWREHCEDEETLCEYAVAMKNLADNHWAKTCEGEGRIEWCCSVCREYFQNGGKRKALEKDEKRAVLATKTTPALNMHESSQLEGHLTNLSFTNPEFILSLLQASGKIRLLDVGSCFNPFLK

SEQ ID NO: 1157 - DNA, 578 bp, Homo sapiens
  misc_feature (316): Wherein n is one of a or t or c or g
agaggaggcttgccccgagccctcaccgctgtgccccgtccccgctggcggggggttttacctggtccccacattttcgctgccgcccgcgccgggccgtctggagcgcttggggcgcgtcatggtggagctggaggcgctgctgccgcctcccggagcggtccccgggggtgccggggtgtgggtgcctgggggccgcccgccggtgctgcgcgggttggtacgcgtgctgaaccgctccttcgagaaggcggtgcacgtgcgggcctcacacgacggctgggcttccttttgcgaccacccagcgcgctacgtncccgcgcagcccgccgtgggcaggagcgggaggaacaggagcaggagatcccatcctggatccggggctcggcctgggtcccggccaggcatccgcctcctcgcccgacgacggcggccgcaccgaccgctttgccttccagctgccctttgctgagggcgcgggcgatggggcgcgcctcgacttcgtggtgcgctatgagacccctgagggcactttctgggccaacaaccaccgccgcaactacacagtcctgctcccg

SEQ ID NO: 1158 - protein, 192 aa, Homo sapiens
  VARIANT (106): Wherein Xaa may be any one of Ala or Pro or Ser or Thr
RGGLPRALTAVPRPRWRGVLPGPHIFAAARAGPSGALGARHGGAGGAAAASRSGPRGCRGVGAWGPPAGAARVGTRAEPLLREGGARAGLTRRLGFLLRPPSALRXRAARRGQEREEQEQEIPSWIRGSAWVPARHPPPRPTTAAAPTALPSSCPLLRARAMGRASTSWCAMRPLRALSGPTTTAATTQSCS

SEQ ID NO: 1159 - DNA, 432 bp, Homo sapiens
  misc_feature (8)..(370): Wherein any n is one of a or t or c or g
gacactgntctggcaaattatttcatgggtatgtcccccaaagcagaggcaacaaaagcaaaattagacaattgggattgcatcaaactaaaaaatttttgcatggcaaaggaagccatcaacagagtgaaaagaaaacctgcagactgggagaaaatatttgcaaatatattgtcaaagggcctcattttgataagggactcatatcaaaaatatataaggaactcaaatgactcaataaaacatatactcgtattaaaatgggcaaatgacatggatagacacttctcagaagaagacatataaatggccaacagatatagttaaaaatgctcaacatcactactcaacagggaaatgcaaattaaanccacaatgagacatcaccctgcacctgtaagaatggctgtcatcaaaaaggtgaatgctagc

SEQ ID NO: 1160 - protein, 101 aa, Homo sapiens
  VARIANT (3): Wherein Xaa may be any one of Ala or Asp or Gly or Val
DTXLANYFMGMSPKAEATKAKLDNWDCIKLKNFCMAKEAINRVKRKPADWEKIFANILSKGLILIRDSYQKYIRNSNDSIKHILVLKWANDMDRHFSEEDI

SEQ ID NO: 1161 - DNA, 407 bp, Homo sapiens
  misc_feature (386)..(401): Wherein any n is one of a or t or c or g
gctagcttaccaggctaggtaaagctatcatcaaatctctaattcatgtgtactggatcctcacaacctccttcaagatataagaagttcaataacccaataccactggggaaagtcaaggtactcacatacaatgtgtcgtattctgattttagaactaaatagtgagattatgtacttgactatatccttaagataaaatctagaaccaaaacaaacaggtatgctatgaaaaatattaagaattctaatggtcattaccataggaaagtgttagtaaaattgtgctagtagtcataatgaaaataataatggaaaaagtaacaacagaaataacaaaaccatctagcccaaagatatgtagagtctgggatgtaactgtgttnntgtcaggagttatnatttga

SEQ ID NO: 1162 - protein, 63 aa, Homo sapiens [sequence omitted]

SEQ ID NO: 1163 - DNA, 404 bp, Homo sapiens
gaattccttagatgaagccagaaccaatgatttagcctccctttgacaccactcttcttgtcctgtatctgtataccgacctcctttgcccaactgttgttaaatccaaagcaacgttattccaggaagtgctgtcaccaccagtgagccaagagagagcagggcggtccttcctgcgggactggggcgcatatgttctgcgggaccccctgcacgcagcccctcccaaagcccctgtctggttgttcctgcaggagtgtgtgcactgtgccgcctccgctgcccagcctgagttcttgctggcgaccccgcctgaatgctttccaggcagcttgggagcacttcggatcccccaacacagcaggggtctgaccccgaggggccgaaagacagagcccaatggc

SEQ ID NO: 1164 - protein, 59 aa, Homo sapiens
MFCGTPCTQPLPKPLSGCSCRSVCTVPPPLPSLSSCWRPRLNAFQAAWEHFGSPNTAGV

SEQ ID NO: 1165 - DNA, 352 bp, Homo sapiens
agatcttttgtctatttggcaatggaagaagattagtattagaggatacgtgttggaaatgtggtttttcaggagaccgatgtccagtgtttttttttacaatcatttccaaccatttcagagctgggtctgccccatcaaagagcaagctctggactgcagatcttcattacgttttcaaccctgtccagtacatcataactgtttaagatagactgactgcaagccctaaatttaaaagactgttaacaaaacgccaaataagatgggtggagaaggatgtagacaagaatgttacaagggaaacaaaaacgatttttgcctttgagtgaaactactgtgatttctggag

SEQ ID NO: 1166 - protein, 51 aa, Homo sapiens
MWFFRRPMSSVFFYNHFQPFQSWVCPIKEQALDCRSSLRFQPCPVHHNCLR

SEQ ID NO: 1167 - DNA, 502 bp, Homo sapiens
  misc_feature (181)..(182): Wherein any n is one of a or t or c or g
ccatggggagcctttccaccactgaagagagctggggttactaaagccacaatcagcttctctgcaacttctaaccatttggctaagatcagtttttctgaaaccacaaagaaaaaaaatctacgaacaagtactagcgtaccaatgttcacagtagcattattcacaagtcataaggtgnngaagcaacccaaatgtccatcaacagatgaataggtaaacaacatgcggaatatacatccaatggaatcctcttcagcctcaacaaggaaggaaattccagtgcatgctataacatagatggacctcaaggacactgtgctaagttaattaagctagacacaaaaggacaaatgctgtatgactccacttgtacgaggtctcttgagtagtcagaaagcagaatggtggctgccaggagctgggcggggggcaggaagaatggggagttattgtttaatgggaacagagtttctgtttgggatgatgataaagttctaga

SEQ ID NO: 1168 - protein, 71 aa, Homo sapiens
  VARIANT (61): Wherein Xaa may be any one of Ala or Arg or Gln or Glu or Gly or Leu or Lys or Met or Pro or Ser or Thr or Trp or Val
PWGAFPPLKRAGVTKATISFSATSNHLAKISFSETTKKKNLRTSTSVPMFTVALFTSHKVXKQPKCPSTDE

SEQ ID NO: 1169 - DNA, 260 bp, Homo sapiens
gctagcagtatgctttggaggtgttaccaacctaagttttttgttttgttttgtttttcttacctttataacaaatatttattaagcacctactatataccaggcactgtgataggctctggggatgcagctgtgaacagggcatcagggtcccacccacatggagcttattgtgagggtgagggttgggaggtgatgtgagacaataaacagaatttctaatatgcaaaagtcccatggaaacagttaagcagggtacc

SEQ ID NO: 1170 - protein, 66 aa, Homo sapiens
ASSMLWRCYQPKFFVLFCFSYLYNKYLLSTYYIPGTVIGSGDAAVNRASGSHPHGAYCEGEGWEVM

SEQ ID NO: 1171 - DNA, 388 bp, Homo sapiens
gaattctagagctgcttaaacccagcatcagctggagacacactggacttgagggagggttggtcccatttcatgatattgtcttgaccgaggcttacccaggtacccttccactccccacgttcagggtgctttgtggcccgactccaaggggtgtcattctcattgagtttgcgagaacattcctggagtgacatcagaactgccccagccagaggctcaggggctgtttgcttgggtctctctttgtttttctgcttcagccaccagccaccctggaatgaatcacaactccccacactacctacccaaggtacacaatgtgggcgtgagccctgggcattgagagctatagtacattttctggcattggtctcacgcccttcat

SEQ ID NO: 1172 - protein, 63 aa, Homo sapiens [sequence omitted]

SEQ ID NO: 1173 - DNA, 385 bp, Homo sapiens
atcttcacatatgagcgcaagtggtactcgcgcaaggacctggcccggcatcgcatgcagggtgaccccgatgacacgtcgcaccgtgggcacccgctctgcaagttctgtgacgagcgctacctggacaatgatgagcttaagcacctgcgccgcgaccactacttctgccacttctgcgactcggacggggcccaggactactacagcgactatgcctacctgcgtgagcacttccgggagaagcactttctgtgtgaggaaggccgctgcagcacggagcagttcacccacgccttccgcaccgagatcgacctcaaggcccacaggacggcctgccacagtcgcagccgcgccgagacacgccagaaccgccacatcgatt

SEQ ID NO: 1174 - protein, 128 aa, Homo sapiens
IFTYERKWYSRKDLARHRMQGDPDDTSHRGHPLCKFCDERYLDNDELKHLRRDHYFCHFCDSDGAQDYYSDYAYLREHFREKHFLCEEGRCSTEQFTHAFRTEIDLKAHRTACHSRSRAETRQNRHID

SEQ ID NO: 1175 - DNA, 360 bp, Homo sapiens
gatctgtcattggtcaaggaggagcctccagaaccggtgccgtcccccatcattccaattcttcctagcactgctgggaaaagttcagaatcaagaaggaatgacatcaaaactgagccaggcactttatattttgcgtcaccttttggtccttccccaaatggtcccagatcaggtcttatatctgtagcaattactctgcatcctacagctgctgagaacattagcagtgttgtggctgcatttgccgaccttcttcacgtccgaatccctaacagctatgaggttagcagtgctccagatgatccatccatgggtttggtcagtacccacagaatcaacccgggtttggagtatcga

SEQ ID NO: 1176 - protein, 120 aa, Homo sapiens
DLSLVKEEPPEPVPSPIIPILPSTAGKSSESRRNDIKTEPGTLYFASPFGPSPNGPRSGLISVAITLHPTAAENISSVVAAFADLLHVRIPNSYEVSSAPDDPSMGLVSTHRINPGLEYR

SEQ ID NO: 1177 - DNA, 397 bp, Homo sapiens
cagctgtcctatccctttcccctgtttaattatttattcaattatttatattagtatggatatttattttattttatgggttacaatccattattattattgttattttgttgctcaaattgttctcgatttgcccattgggagtgccttccaattggcttggctgtgatgtgcttttgtcatgcctcatcctattttgagcacttccttattttctgggatggcaacatgtttcagaggctcatcttctgttttcctcgccctagccctggaatcagcaacttctccaagaagctctggctcctcttatgggaaaagaaacatcttggatttaaaatttaaaaaatgaactcaaacataaaaatatattgcggatgcatacttgggtcatatagtt

SEQ ID NO: 1178 - protein, 88 aa, Homo sapiens
MGYNPLLLLLFCCSNCSRFAHWECLPIGLAVMCFCHASSYFEHFLIFWDGNMFQRLIFCFPRPSPGISNFSKKLWLLLWEKKHLGFKI

SEQ ID NO: 1179 - DNA, 560 bp, Homo sapiens
acgcgttgtgcagggatgtggactctgctcttagcatcctcttccactctggggccatttgtccagaaggaagcacccagtgggttaattttaccgtgttttgaactcctgtctttgctttggcatttaaacaaagaaatgtacgttgtaacctgttataagggactgggaattgggggagaacttgaaaccataataacgtgtgtttcctctagctgcatataggtaaaaagtcttcgtttattttggtctactttgatttggcctatgctgtgagattattcaaagtagaacattctgaacaatgaagttctaaacattgtttcccaaataacgatttttattactttttgctgggaccatatttagaattctgaaaaatctgttttgtcttaacttactttgtaagggaggttgtcttatgggattaattatatcttatgaacaatggaaaacaatattacttttatttgaatgcagtctgcaaaacctcacagaaagtgcagttgtcttcacaacgttctgtaagaagagcaagctagaaatatcaagggagaaaa

SEQ ID NO: 1180 - protein, 69 aa, Homo sapiens
MWTLLLASSSTLGPFVQKEAPSGLILPCFELLSLLWHLNKEMYVVTCYKGLGIGGELETIITCVSSSCI

SEQ ID NO: 1181 - DNA, 366 bp, Homo sapiens
acgcgtgaacccttccgactcggcctccaggcccctctcccgggtctgttctctggagcgctctccccatccgcagtgggattcggtgcactcctctgttttgtctcctctgtctcccgccactggaacggaagctccaggaggacgggatttgcctgattctttgctgtatcccagtgaactgaatgagctgctcccagacagttagaatcgcagccggggcccaggcggctgactgcacagtgaggagccaggccggacaggccccaggcgcccccgcccagccctgggtggcaggaaccccagctccacgctgctgctggtgcgtttccttgttctgcgtttccttggtctggccttgttctg

SEQ ID NO: 1182 - protein, 60 aa, Homo sapiens
MSCSQTVRIAAGAQAADCTVRSQAGQAPGAPAQPWVAGTPAPRCCWCVSLFCVSLVWPCS

SEQ ID NO: 1183 - DNA, 664 bp, Homo sapiens
  misc_feature (602)..(663): Wherein any n is one of a or t or c or g
gtttcgatgctgtttttaattctgcaaatgtaagcctttccactttaagtccaagctcagcgcagaggactgttctataatacatacaatttagtttaaaaatgttgcaaatgttaacatgtgtcacaaactcaagcaatccagtattatagaaagcaaagaatgaaatgtgctgcttctttctcccccagacgcccttgcatacattaagatatgtatatatggaaatgttaccgggagtcccggttatcccaaaaagggttgtttcctgttgcgtggtgaggccaatgcacgaaaccgaaagggagtgtgtcaagcagtgcaggctgtattcaatggctatggaattggaagatctgaaatcaacttagcttgtgagagctgggaagtttcagagtcgttgtcatggcgaccgtcagttgtcacggcgctggtgggagtgttgtttagcatgagaacaggatgatgataaagccagaggctcttcagaggcgccatcttggatttcgccagcttcagctggttttcgtcctaagaaggaacttcgaaacacaggcattctttttcctgaaaataaggcagagttaccagctgagtagggnttttaggctcttgtncccttatgcntttcgcattngggcagcaaaaagcagggntggggtnc

SEQ ID NO: 1184 - protein, 67 aa, Homo sapiens
  VARIANT (47): Wherein Xaa may be any one of Ala or Asp or Gly or Val
  VARIANT (52): Wherein Xaa may be any one of Cys or Phe or Ser or Tyr
  VARIANT (59): Wherein Xaa may be any one of Arg or Gly or Trp
  VARIANT (65): Wherein Xaa may be any one of Ala or Asp or Gly ot Val
MMIKPEALQRRHLGFRQLQLVFVLRRNFETQAFFFLKIRQSYQLSRXFRLLXPYAFRIXAAKSRXGV

SEQ ID NO: 1185 - DNA, 743 bp, Homo sapiens
  misc_feature (1): Wherein n is one of a or t or c or g
ntttttttttttttttttttggacacaacatgatattaggctttatttgaatttaaaatcttgattccatccagggacattttttaccgaagcgtctcagagactggctcagggtatttcttgagaagactgtacagggcttctcatcatacacaaaccctccacagcccacggctccaacccacagcacctcctgcagtccttttatgcttcttgtttcttctccatcaataatatgtcagtcaactgcttgtcagagacacttagctgctgacaggtcctcataacctgactcaggtaaactgccaagagatgcttgcacaggatgctgtcactcttccgtagcactgagaatgcaaatgcaggacatgaacagtaatgacaagaagccaaacatgtgtatgttttactggaacttccaaggacctggtaaacacgccttccactgggtgatgagattaaggtgatggactgtcgatcaactaggtccaaggcctgggtggctgatgagccaaagagaaacttcagcgataacagatattcatcaggaattcggtcccgtacttcgcgcgctctcctgcaccgccgccgccatctcgctcaggagctcctccacaaccgccggcaacactacggccatcgcgccgcaggacacgccctccacgaccgggaccgccgcgacgctccagctgactgcgcctacctgtggaggatcctgaccccccgccggcctcgttccgaat

SEQ ID NO: 1186 - protein, 52 aa, Homo sapiens
QIFIRNSVPYFARSPAPPPPSRSGAPPQPPATLRPSRRRTRPPRPGPPRRSS

SEQ ID NO: 1187 - DNA, 955 bp, Homo sapiens
gcggccgccctgaacggggagcaggcggccctgctccggagaaagagcgtcaacaccaccgagtgcgtcccggtgcccagctccgagcacgtcgccgagatcgtcggccgccagggttgtaaaattaaagcactgagagccaagacaaacacgtatatcaagactcctgttcgtggtgaagagcccatttttgttgtcactggaaggaaagaagatgttgccatggccaaaagagagatcctctcagctgcagagcacttctccatgattcgtgcatctcgaaacaaaaatgggcctgccctgggaggattatcatgtagtcctaatctgcccggtcaaaccaccgtccaagtcagggtcccttatcgtgtggtaggattagtggttggacccaaaggagcaactattaaaagaattcagcagcagacccacacctacatagtaactccgagcagagataaggaacctgtctttgaagtgacagggatgcctgaaaatgttgaccgagcacgggaagaaatagaaatgcatattgccatgcgtacaggaaactatatagagctcaatgaagagaatgatttccattacaatggtaccgatgtaagctttgaaggtggcactcttggctctgcgtggctctcctccaatcctgttcctcctagccgcgcaagaatgatatccaattatcgaaatgatagttccagttctctaggaagtggctctacagattcctactttggaagcaataggctggctgactttagtccaacaagcccatttagcacaggaaacttctggtttggagatacactaccatctgtaggctcagaagacctagcagttgactctcctgcctttgactctttaccaacatctgctcaaactatctggactccatttgaaccagttaacccactctctggctttgggagtgatccttcccttgtgccgaatt

SEQ ID NO: 1188 - protein, 318 aa, Homo sapiens
AAALNGEQAALLRRKSVNTTECVPVPSSEHVAEIVGRQGCKIKALRAKTNTYIKTPVRGEEPIFVVTGRKEDVAMAKREILSAAEHFSMIRASRNKNGPALGGLSCSPNLPGQTTVQVRVPYRVVGLVVGPKGATIKRIQQQTHTYIVTPSRDKEPVFEVTGMPENVDRAREEIEMHIAMRTGNYIELNEENDFHYNGTDVSFEGGTLGSAWLSSNPVPPSRARMISNYRNDSSSSLGSGSTDSYFGSNRLADFSPTSPFSTGNFWFGDTLPSVGSEDLAVDSPAFDSLPTSAQTIWTPFEPVNPLSGFGSDPSLVPN

SEQ ID NO: 1189 - DNA, 692 bp, Homo sapiens
  misc_feature (690): Wherein n is one of a or t or c or g
gattttaattctgcattggaagcagctggtgataaacctaaggcatatgcctaacatacaatatcagcaggtcagaaagggaaacaaacttaggctgtggcaacttttactaccagcgtgaacaaccagcatttttattgcatttgagaatgcttataatgtcagtaattagtactgactacacaacattttttttattgtctgtatccgcagacatggaatgatggaattacagttgatgtcaaggaatgagtttcttttatgccttatcaaaacaaaacaaaacaaaacaaaaaaattcttgttactggcagcacatatacatgaagcaccatgctcacagtccggactgtatcatcttcatcaaggcttatgggtagcagagattgcgtgagctacactgggcccaagaaatgccttcagcattgtaaatctgattttcaggataaagaagcaaaactgactttgaagacatccagaatttcaggaggctatgtcattaaccaaaaggtaccaaaaagattcaaaatctgaataagcacactcttctttgtgcctttggaaacggagttcagctggaatatggaaaagagaggaaatattttttaactctattttttttcatgaggaaaaaaaagctagtgatttacagcctatcttgggttaagaatccaaggttttctttactangt

SEQ ID NO: 1190 - protein, 66 aa, Homo sapiens
MLTVRTVSSSSRLMGSRDCVSYTGPKKCLQHCKSDFQDKEAKLTLKTSRISGGYVINQKVPKRFKI

SEQ ID NO: 1191 - DNA, 760 bp, Homo sapiens
  misc_feature (152): Wherein n is one of a or t or c or g
cggctacttccgagccttctaccaaggtccctgttgcatgtatttcctaagagcagagtttatttctctttacattccctgcttccttgctctccatgcagggaccccagccaacctctgggctgttgaatagctctctgctgggtggcaancccttctccttggcaccctgttgcttaagcatacagattgctcaccaggtgcacacagacagctgtactgtccaagcccattctgctccaccctgtcctcttcagctaaagagcattccagtaatctaaagcccttttcccctggagaagtccagagtttgcagcagtgtggagctgagcttgaacagaacagaccctcagcacggccctggactaatgcactcttatctgagggcagtccattctagaaggttgatgaatttccctaccactctcctggggaccttttctctctagtgggaacaaatgctacataatttagtcaagatcctattaagtcatctcacctgaggcatctggagagggagttgccttccattggtgggaaattgttggtgccagaatacattttgcccaaaactcttctcattggctggccacctagcagggctcctctaaacacgcaactcagcgaggggacccccttcacctctggcaagagagctgggtagatcagaaacttggtgacacctggctagcacagagcaggctcacttgtcttggtcccactacccagattcctgcagacattgcaaaccaaatgaagg

SEQ ID NO: 1192 - protein, 61 aa, Homo sapiens
  VARIANT (19): Wherein Xaa may be any one of Asn or Lys
MQGPQPTSGLLNSSLLGGXPFSLAPCCLSIQIAHQVHTDSCTVQAHSAPPCPLQLKSIPVI

SEQ ID NO: 1193 - DNA, 639 bp, Homo sapiens
  misc_feature (1)..(154): Wherein any n is one of a or t or c or g
ntggagaagctggggagaaggcgtgggaggaagatggactcggtggagaagngggccgccacctccnngtctcaacccgcggggcgaccgtcccggggccggccgccgaagctgcagcgatctcgcggcgcagggcgaggtggggagaagcccncgcacctggcagccctaattctggcccggggaggcagcaaaggcatccccctgaagaacattaagcacctggcgggggtcccgttcattggctgggtcctgcgtgcggccctggattcaggggccttccagagtgtatgggtttcgacagaccatgatgaaattgagaatgtggccaaacaatttggtgcacaagttcatcgaagaagttctgaagtttcaaaagacagctctacctcactagatgccatcatagaatttcttaattatcataatgaggttgacattgtaggaaatattcaagctacttctccatgtttacatcctactgatcttcaaaaagttgcagaaatgattcgagaagaaggatatgattctgttttctctgttgtgagacgccatcagtttcgatggagtgaaattcagaaaggagttcgtgaagtgaccgaacctctgaatttaaatccagctaaacggcctcgtcga

SEQ ID NO: 1194 - protein, 202 aa, Homo sapiens
  VARIANT (7): Wherein Xaa may be any one of Arg or Gly or Trp
  VARIANT (12): Wherein Xaa may be any one of Ala or Arg or Gln or Glu or Gly or Leu or Lys or Met or Pro or Ser or Thr or Trp or Val
  VARIANT (41): Wherein Xaa may be any one of Ala or Pro or Ser or Thr
MDSVEKXAATSXSQPAGRPSRGRPPKLQRSRGAGRGGEKPXHLAALILARGGSKGIPLKNIKHLAGVPFIGWVLRAALDSGAFQSVWVSTDHDEIENVAKQFGAQVHRRSSEVSKDSSTSLDAIIEFLNYHNEVDIVGNIQATSPCLHPTDLQKVAEMIREEGYDSVFSVVRRHQFRWSEIQKGVREVTEPLNLNPAKRPRR

SEQ ID NO: 1195 - DNA, 746 bp, Homo sapiens
acttcagttgggctgaggcggaggagccgccgcttctgacctcgctctggctccggtgcgcgcggctgagcgcgtgcgaggccccgcgcgtcgggcaggggcggcggcggccactgcgcgccgccctgaggagcgccccagcggcggcgcgactgcggctgaggagagagccggctccgggcctccgcgtcctcctgctcccccggccccccgcctcctcgggggggcggcggcgactacggactggtgacggccggctgcggcttcgggaaggacttccgtaagggcctcctcaagaagggcgcgtgctacggggacgacgcgtgcttcgtggcccggcaccgttccgcggacgtgctcggggttgcagatggtgtaggaggctggagagactatggagttgatccatctcaattctcagggactttaatgcggacgtgtgaacgtttagtaaaagaaggacggttcgtacctagtaatcccattggaattctcaccacaagctactgtgagttgctgcaaaataaagtccctttgctcggtagcagcaccgcctgcattgtggtgctggacagaaccagccaccgcttacacacagcaaacctgggcgattcaggcttcctggttgtcaggggtggtgaagtcgtgcaccgatcagatgagcagcagcattacttcaacactccattccagctctcaatcgctccccctgaagccgagggagtcgtcttgagcgacagtccgga

SEQ ID NO: 1196 - protein, 194 aa, Homo sapiens
GESRLRASASSCSPGPPPPRGGGGDYGLVTAGCGFGKDFRKGLLKKGACYGDDACFVARHRSADVLGVADGVGGWRDYGVDPSQFSGTLMRTCERLVKEGRFVPSNPIGILTTSYCELLQNKVPLLGSSTACIVVLDRTSHRLHTANLGDSGFLVVRGGEVVHRSDEQQHYFNTPFQLSIAPPEAEGVVLSDSP

SEQ ID NO: 1197 - DNA, 1480 bp, Homo sapiens
  misc_feature (1)..(775): Wherein any n is one of a or t or c or g
nngtataaactgtcaaattttcaaataataggtagggggctttcactaggaaaatcatgtgctcaaaagaggaaatgactcgtagtcaggttcaggagttagtggagtatttggactttggtactgctgtcttccaaggtagctctaagttttgatgtgtgggcttctgagtttatattctgaaaggaaatacacttcttttgaacatccccactaggttcttttccattgtcaataaggagcatcagccagtgaatctgtttcaggtttccattctgcagaactcctccaaagcatgtgctagtggcaagacagtggttcttatgatgttttcccttaacttttccttgtatgttcttgggtggttcctaagggaaagggaagcacatgatcatgggaatgatagcccagaacaaaaagaaatcttgtcttaccacagtgttttataggagagattgggagaaatcatcctgttttctctgtgacctgatttcagaagagactgatccaaaaattataacggcagggaacctagtgcatttggcactgagatttaaatgcaaccagaattgtcctcaaggcccagccataaaagcattgtctctctcgaccttctggtatcttgttagagagcttttcactgtgaggaagtgtggaaaaatagctctgtgtgtgtgtgtgtgtgtgtgtgtgtgtgtgtgtaatctgttaggttggggataggttttctgctagccaatattaaaagagacctgcaataaaaaaattaccctgnatctgatagaaagcaagtgtttttgtatgtgtgggtgaatgtgtgttcatgcccgtatatgtctacacacagatgacaaattatatttgaaatcgttggaaaataaattcagatcaaaatgcctttcaggcccattacctagaaatctatcttaaaacctgggtatgttcctaaggtcatttctttgcttatgctaaattaattacaattatgaatggaggatattctactgtacttttttaaaaagaaactatttttgtgtttgaaagtgaaaccaacatccagatctatagcagagtccttattcttctcataaatctttttactttggctacaaatagatgatggtatgattctattatatattttatataaaatccatccaaattaagttttgggtaagtgtgttgtttaatctgaactatagtaacttaatactctaaacaatagttcactccatttggtcctttctccacagatgtaattatgttttcaactcaggaactatggcaaggaactttccccagatcaaattctattaacgctgagatacaagtcatccatgcacagccactatcataccctttattctcactgaaaggcagaactcagaacctgttattttatgtctgtaatcatgtactttggcatcttttggaggaaaggggccggagtactccctggaatgttctctggctggatatt

SEQ ID NO: 1198 - protein, 111 aa, Homo sapiens [sequence omitted]

SEQ ID NO: 1199 - DNA, 1853 bp, Homo sapiens
  misc_feature (1)..(2): Wherein any n is one of a or t or c or g
nntaaccatcatcctccaggacaaatagcaaggaaatacagttcctgctccaccattttcctagatgatagcacagtcagtcaaccaaacctcaagtatacaattaaatgtgtcgctcttgcaatatattatcacatcaaaaacagggacccagatggaaggatgctcttagatatttttgatgaaaatcttcaccctctttcgaaatccgaagtgccaccagattatgacaaacacaacccagagcagaagcagatttaccggttcgttcggacactgttcagtgctgctcagctgacggctgaatgtgccatcgtcaccctggtgtaccttgaaagacttttaacatacgcagagatagatatctgtccggccaactggaagcggattgttttaggggcgatcctgctggcctccaaggtgtgggatgaccaggctgtatggaatgtggattactgccagatcctgaaagacatcacggtggaggacatgaacgagctagagcgacagtttcttgaattgctgcagttcaacatcaatgttccttccagtgtctatgccaagtattattttgatcttcgttctctggcagaagcgaacaacctgagctttcccttggagcccctgagcagggagagggctcacaagcttgaggccatctctcgcctctgcgaggacaagtacaaggacctaagaagatccgcgagaagcgctcagccagtgcagacaacctgactctgccccggtggtccccagccatcatcttttaactacggaggcccgccggaggcaacaccatcccttagtttctcctttagtttgagaaaagacagacttggggtgggtttgtttttgttttttctttccttttctttttttacgcatagctccgtcaagctgcctggatgagcgcccatgcagcaaggcttggaggaagcgtcagtgccctggagatcccagctcgctctccccactgtcagcaacagcacttccttcgtggaggaagtggactcgaatcctggaggaggaaataaagggaaagggaagtcgtggagaggcagggaaaatggttaagcagcccggccctctggagtccccatgggggcggtagctgaagttggcgagcgcagcggtggatgcagagctggctgcacccagggctgggccagtgtgtcctgtaagacttcttgcattccttctgctgcttttttgggatgggggtatttttgttcatttgtttttgccctgttttgattttggtcccacagagcaggggatgtagtttgtacccaccatggcgcagacttccaaataaatagtactggtcatttctctccgcactatttctgcgcgctgtcttctgagctttcttcctcaccagtgggctgtgcttgttccatttctgtacacccttattttataccgtttttcttcaacaatggcgaaattgactgtagtgctgaaccaaaagtatccctttccctccttattcctcaccccaagaacattctagatcacatgggtgcttgtgccttccgattttcttgcatttgtttttttcctgacctgaagttgttgttacaaaatcagtcagactttgtgggctgaaggacacggtgcagcagagggtgtccctgtgagagttctgcagagtgctgggcatgtgcctggaactaccgagtaggagccatttctttgtacccctgcctaatccattcctctccttccaagtccattgttgcaagcaatattcttctcaatttttatatgtttactttaaatcaaagttagtctatttgtataaaatttttaaaaaatctactcgtgccgaattcttggcctcgagggcaaaa

SEQ ID NO: 1200 - protein, 244 aa, Homo sapiens
  VARIANT (1): Wherein Xaa may be any one of Ala or Arg or Gln or Glu or Gly or Leu or Lys or Met or Pro or Ser or Thr or Trp or Val
XNHHPPGQIARKYSSCSTIFLDDSTVSQPNLKYTIKCVALAIYYHIKNRDPDGRMLLDIFDENLHPLSKSEVPPDYDKHNPEQKQIYRFVRTLFSAAQLTAECAIVTLVYLERLLTYAEIDICPANWKRIVLGAILLASKVWDDQAVWNVDYCQILKDITVEDMNELERQFLELLQFNINVPSSVYAKYYFDLRSLAEANNLSFPLEPLSRERAHKLEAISRLCEDKYKDLRRSARSAQPVQTT

SEQ ID NO: 1201 - DNA, 590 bp, Homo sapiens
ttttttttttttgatttttaactttcacttccgaataatgttagatttacagagtagtgcaaagacagcacatagagtttggatgcctcccccgcccccctactgtttcatcttgtcgccttcgtcacagcctggcacgtggctcttccctgaattccagccttcctttgggctcctgctttcccagtgccgtttgtctggtccaggactctgcaccatctcctgaggccccgctggtctaggacggccttgacagcttttgggggcactgcttgacatcctgcagagtgtcccagtcagggctggtcttgggggttgtctcagggccggactggtgccctcctcatcccctcccaccagggtcaaaacccccgcctgccggtcatgtgactgctctcccccggtgccctgtgtgtggggagagtcagtgaagcccccactcaaatggttcagctccttctctggggacatccagcacgtttcttcagattcctctccaacaattcatggtccctgtaatgaactcccaccgttcccgctgtcatccgtcgatgatggagtgcgagccgggagctgcagccccgcggccg

SEQ ID NO: 1202 - protein, 123 aa, Homo sapiens
MSPEKELNHLSGGFTDSPHTQGTGGEQSHDRQAGVLTLVGGDEEGTSPALRQPPRPALTGTLCRMSSSAPKSCQGRPRPAGPQEMVQSPGPDKRHWESRSPKEGWNSGKSHVPGCDEGDKMKQ

SEQ ID NO: 1203 - DNA, 588 bp, Homo sapiens
gacttcgtgggtcccgggccaggggcgggcgccgccatgggtaacctgttcggccgcaagaagcagagccgcgtcacggagcaggacaaggccatcctgcaactgaagcagcagcgggacaagctgaggcagtaccagaagaggatcgcccagcagctggagcgcgagcgcgccctggcccggcagctgctgcgggacggcaggaaggaacgggccaagctgctgctcaagaagaagcgataccaggagcagctcctggacaggacggagaaccagatcagcagcctggaggccatggttcagagtattgagttcacccagatcgaaatgaaagtgatggaggggctgcagtttggaaatgagtgtctgaacaagatgcaccaggtgatgccctgcgggtccccgagccaccagcagccaggactggaggctgtggggcatggcgtgacttctcgtgcacagggctggtttggttatgagacgatctcgctgggaccgcccctgcccgtggaaagccacaaggacaaagggagcggccacctcgacccccagacaggccggcccgtattaaagttggccctgcaaaaa

SEQ ID NO: 1204 - protein, 196 aa, Homo sapiens
DFVGPGPGAGAAMGNLFGRKKQSRVTEQDKAILQLKQQRDKLRQYQKRIAQQLERERALARQLLRDGRKERAKLLLKKKRYQEQLLDRTENQISSLEAMVQSIEFTQIEMKVMEGLQFGNECLNKMHQVMPCGSPSHQQPGLEAVGHGVTSRAQGWFGYETISLGPPLPVESHKDKGSGHLDPQTGRPVLKLALQK

SEQ ID NO: 1205 - DNA, 299 bp, Homo sapiens
gtcgacgctcaactatgaagatcactgcttcagcgggcacgccaccatgcacgccgagaacctgtggccggggcggctgtcctccgtccagcagatcctgcagctctctgacctgtggaggctgaccctccagaagcgtggctgcaaggggctggtgaagttccaggccgaccccgacgtgctgcacaacagctatgcattgcatggcatccgctacaagaacgaccatatcaacctggccatgctggcggatgccgagggcaagccctacctacacgtgtccgtggagtccccgtggg

SEQ ID NO: 1206 - protein, 84 aa, Homo sapiens
MHAENLWPGRLSSVQQILQLSDLWRLTLQKRGCKGLVKFQADPDVLHNSYALHGIRYKNDHINLAMLADAEGKPYLHVSVESPW

SEQ ID NO: 1207 - DNA, 909 bp, Homo sapiens
acgcgtcccctctttatccccaatgtgccccctccattaggggctccaggtgggctccagcccacacttgctctctgcctctgctgacacgtgcacacacacacatgcacacactgctcctctctgcctgctttcccctggagtcccatgccctgccccatccagacactgcccaaggcccacccgtctatttccacctcattccccctttaagctgagaatggggtctgcctatagaagcttccagagacagctgagactgggtccccggtgcctccaccctaggatctcaggcctgccccaaactgcttcttacagcgtggaggtttctctgatttctcccttatctagcaacacttggttcttttggctagtcagggctgggatcccagggggatcagccgtgcagggagtcagaggtaaagaagcatccacactggagggtatgtggggaaggaagcccacattggcagaagctctgcaaacacagtccgagggactaggagtccatacaatgcctcacacacaaaggccattgtcaaagcctcggcctggcagaaagtaaggggggtggggccgctaccgactcctgctcagccacccctggtcctcattctgggatgaggggagggcctaggagaagccctccctttcagtgcagattcccttcttgaatgggacattgagttcctatcagccaccccagactgggtcttcccatgtatataatggaggaagacccctcccagccctctcagtcccccagctcaaagtgcctcagttcctccatctgctcccagatcccctggcactctagacaggcatgcccatgggaaggaccctgggatggagaggcaggcttcgcggcccttcatgcctgcccactgggatttcagttaactcacccca

SEQ ID NO: 1208 - protein, 114 aa, Homo sapiens
MGSAYRSFQRQLRLGPRCLHPRISGLPQTASYSVEVSLISPLSSNTWFFWLVRAGIPGGSAVQGVRGKEASTLEGMWGRKPTLAEALQTQSEGLGVHTMPHTQRPLSKPRPGRK

SEQ ID NO: 1209 - DNA, 615 bp, Homo sapiens
  misc_feature (608): Wherein n is one of a or t or c or g
gatgtaatagatgacttcaaaagcctgctccttactgcactctggacaaggccctggtctgtatagtttggcttcctctgttaagtcattctacaaggtgacttgccatttgaactttcgtaagagacctcagcagttagactgagaaaagttagagtgctgtagttatgaagtcatacatttttgataaaatacctgtggaaaaccagggatcctctcctgtttctctctcttgcctccccctttccctccattcctctgtcgcctccccctctcctccactttctttaagaatcagggggtacagaataacctacaaacaacctcttcaaagtacccttgggaaattgaagttcaatcttaagttttttgctgtctttaatttactagaattgcctaatttttagttgatttctctacagagcttagcttgtgtagttatttctcttttactgttgctttggtgtgtcttgaagtttgattgattatttttggtcattgagttcttagtgtagtttgctagatgattattaagattcttttgtgtctgacacttgtggtgagttgcttttgaaatctgttgagatttccatgtgagaactgataancaggctc

SEQ ID NO: 1210 - protein, 79 aa, Homo sapiens
MKSYIFDKIPVENQGSSPVSLSCLPLSLHSSVASPSPPLSLRIRGYRITYKQPLQSTLGKLKFNLKFFAVFNLLELPNF

SEQ ID NO: 1211 - DNA, 1587 bp, Homo sapiens
agtctgtgaaaaccgaccaagtgctgggggacgtgggtctgatcccatttcctgactcatactatgggcttctggggaccttgccctgccaggaagcactgagccacatttgcagcctgcctagtgaggtcctgaggcacgtgtttgccttcctcccggtggaagacctctattggaacctgagcttggtgtgccacttgtggagggagatcatcagtgacccgctgttcattccttggaagaagctgtaccatcgatacctgatgaatgaagagcaagctgtcagcaaagtggacggcatcctgtctaactgtggcatagaaaaggagtcagacctgtgtgtgctgaacctcatacgatacacagccaccactaagtgctctccgagtgtggatcccgagagggtgctgtggagtctgagggaccaccccctcctccccgaggctgaggcgtgtgtgcggcaacacctccccgacctctacgctgctgccgggggtgtcaacatctgggccctggtggcggctgtggtgctcctctccagcagtgtgaatgacatccagcgactgctcttctgcctccggagacccagctccacggtgaccatgccagatgtcaccgagaccctgtactgcatagccgtgcttctctacgccatgagggagaaggggattaacatcagcaataggattcactacaacattttctattgcctatatcttcaggagaattcctgcactcaggccacaaaagttaaagaggagccatctgtctggccaggcaagaaaaccatccaacttacacatgaacaacagctgattctgaatcacaagatggaacctctccaggtggtgaaaattatggcctttgccggcactgggaagacctcaacgctggtcaagtatgcagagaagtggtctcagagcaggtttctgtatgtgacattcaacaagagcatcgcaaagcaggccgaacgcgtcttccccagcaacgtcatctgcaaaaccttccactccatggcctacgggcacatagggcggaagtaccagtcaaagaagaagttgaatctcttcaagttaacacccttcatggtcaactccgtccttgctgaagggaagggtggattcataagagccaagcttgtgtgtaagactctagaaaacttctttgcctcggctcacgaagagctgaccattgatcacgtgcctatttggtgtaagaacagccaaggacagagagtcatggttgagcagagtgaaaaactgaatggtgtccttgaagcgagccgcctctgggataacatgcggaagtggggggagtgcacagaagaggcgcaccagatgactcatgacggctacttgaaactctggcagctgagcaagccttcgctggcctcttttgacgccatctttgtggatgaggcccaggactgcacaccagctatcatgaacatagttctgtctcagccatgtgggaaaatctttgtaggggacccgcaccagcagatctataccttccggggtgcggtcaacgccctgttcacagtgccccacacccacgtcttctatctcacgcagagttttcggtttg

SEQ ID NO: 1212 - protein, 441 aa, Homo sapiens
MNEEQAVSKVDGILSNCGIEKESDLCVLNLIRYTATTKCSPSVDPERVLWSLRDHPLLPEAEACVRQHLPDLYAAAGGVNIWALVAAVVLLSSSVNDIQRLLFCLRRPSSTVTMPDVTETLYCIAVLLYAMREKGINISNRIHYNIFYCLYLQENSCTQATKVKEEPSVWPGKKTIQLTHEQQLILNHKMEPLQVVKIMAFAGTGKTSTLVKYAEKWSQSRFLYVTFNKSIAKQAERVFPSNVICKTFHSMAYGHIGRKYQSKKKLNLFKLTPFMVNSVLAEGKGGFIRAKLVCKTLENFFASAHEELTIDHVPIWCKNSQGQRVMVEQSEKLNGVLEASRLWDNMRKWGECTEEAHQMTHDGYLKLWQLSKPSLASFDAIFVDEAQDCTPAIMNIVLSQPCGKIFVGDPHQQIYTFRGAVNALFTVPHTHVFYLTQSFRF

SEQ ID NO: 1213 - DNA, 578 bp, Homo sapiens
gcggccgctggggcgcgccgagcctccctggccccgagtcgccggggtcaggggacaccctgtaggcgcgctctttctttgtgccctggggcgacgggtccccctggccggcggcccaggcggcgccccccacctcgtgggacttttctttgaaggcccggagacccctggggcaaaactcccacgggccaggcctgccgctggagctaaaaagcggcatttgcgcagttgggcttgcctggaaacttggcaaactttggtcggatcctcccctgcagagcgagggcctggcctggcgaccccctcatttcaagtcgcttctagggacctagcgccctaagctcagtggccttcagggtgctgcgagcgagcggggcggcacaaaagcgcgttcggtccaagccaggccccttcgaggactttgtgtagattggtacctaagtttaatgccttttgagtttctttttaaacagtattaatgtaataattaatgtaataaaaagaacaaaggacgaattcgttcgattgttttaagttctgtgtaatgtttaaaaccgctcccacttcagattggtaac

SEQ ID NO: 1214 - protein, 73 aa, Homo sapiens
MPLFSSSGRPGPWEFCPRGLRAFKEKSHEVGGAAWAAGQGDPSPQGTKKERAYRVSPDPGDSGPGRLGAPQRP

SEQ ID NO: 1215 - DNA, 2223 bp, Homo sapiens
ttttttttttttttttttttttttttttttcccttaaaggactttatttctctatttttatatggatcatttattaaattagaagactaaaaagtaaaaatatattttacaatcaaagaaaaatctggacaatggaccccagtaaaataatcagaagcgcacgttctgagaccactcctgcctggcaccctgcagggtagcgcccagggagcatctgcagaggggagaggagaggagggggagcctccggcgacctgtcttctatctccggagccccgcctgaggctccaagatggcacagtcaggctgtccttagtgaccgctgccacggagctggcgatcggcctgcatcttcaaacccaggagcaggagcagcagaggctggcaaggcctgggccctcagacaccaggggcctaaacccagctcccaaacccactgcagcctccccttgtgagctggcagacaagcctgtccttctgagtgtgacgacctcatccacacctgacacaggcgggggcgggggagggtgggggttgtgaaccagctaattctggggaccgctcggaggggctcagcaagctgcttctacagtaagccacttctacagtaagccttcaaacaggaaataaagcataaaatgaaggaaagaagaatcttatttaattaaaggccttgcaaaatgtgatttgtctattaaaaaaataaagcgcttgtgaaaaagaaaactaagagatggcggcaagcgtggtcatcggcaaagggttgctctccctccagcgaggctggcccccactgtgtgggtccctcgggcccccacacgggctgctcaagggctggcagcaggggccacgtcctctctaggagacacccacagagccacatgtgcacgcgtgtggcagtctcactgcaccccagcaacgcgaaggcagaaaccggtgctggtggccacacctgggcgcctggacaccgaagcccccagcacagtgaggcctctgagtgtggcttgtggtctgtcctgggttagagttgttaatatcacggaacataccatctagaacgttccagtcccgcctgacaccttcattcccaatggagaagaaatctacacaggcgtaagaccaggccatctgagacagggaatcccaggggcccctccgtctgagtggtcggcgtctgctgaacaaataccatgtctttcttcttcaaaggatcaaaggcctttaggacccacagctgaagaaggcgcctgctgccagcatgtccctcccccacggccaccacacacttcaagtttacaaaaataaatatttatcaacagtatatttgacaaaaaccacccccaatcgatggcagaaagcagtattttctagctggcactgaaacttaacctatttttttgagggagaaaaagactaaaatgtaagcactaacttcctccttctgcatcttccacagaagacccacttgtgggcattctctttctgtccgttatcagtgggtttacatccgaaggccggcggcaagacacttgaaccacaaacaccagacatgcaggtgtctcaatggcatgcagattatttaaagtgcatcacttgtgagaagcttctcaaatttctgactgtcataaccaggtgtcacctaaaatctgtcctgtaggccaagatgctacacgcagcgcccaggcagtcagaggtaagtgagcgcctcccgcctcagaaagcttttacagggccacgctcgccaggctttcctcgcccacgctgaacccacgtcctgggcacagcagctcccaagctgtcagcaagtcggctgaagtgccaccacaccctctcggaatcatgcacagtgctgcctctatcacctctcaccccagcctcgcaaggcctgttgagaagagaagctccctgggaggacacccacggagctggcacgagcgcagcaggagagacggacggcacgtccggcgggcgaaggacccggcttcagatgcccgctggctggcaatcagcagagcctggccaaccgtgccaggcccccttcctcactccaggtgtgggttcattctgccttcaggccggagtctgtcacaaggctggctggacagtggccaggtgagccagcagaggcggccccacaccatccacaggaagctgctcagctcaccagacccaagccctggccaggggccaggctcacagcaaagcgcgttagggcaagggcgt

SEQ ID NO: 1216 - protein, 128 aa, Homo sapiens
MHSAASITSHPSLARPVEKRSSLGGHPRSWHERSRRDGRHVRRAKDPASDARWLAISRAWPTVPGPLPHSRCGFILPSGRSLSQGWLDSGQVSQQRRPHTIHRKLLSSPDPSPGQGPGSQQSALGQGR

SEQ ID NO: 1217 - DNA, 720 bp, Homo sapiens
cgataggtactcctgtattgtgagtgcggccaaaaactctctcttactgatgcagagaaagttctcagagcccaacacttacatcgatggccccagcagtgcacaggcccaggctcctccccgacgttgtcctgcctggacaatgcaactgaggccctcccggcagactcaggcccaggtcccaccccagatgagccctgtatgacgacgtggacctgtcagagctcacagctgcggtggagcctaccgaggaagccacccctgttgcagatgacccaaatgagagagaatctgaccgggtgtacctggacctcacacctgtcaagtcctttctgcatggccccagcagtgcacaggcccaggcctcctccccgacgttgtcctgcctggacaatgcaactgaggccctcccggcagactcaggcccaggtcccaccccagatgagccctgcataaagtgtccagagaacctgggagaacagcagctggagagtttggagccagaggatccttccctgagaatcaccaccgtcaaaatccagacggaacagcagagaatctccttcccaccgagctgcccggatgccgtggtggccaccccacctggtgccagcccacctgtgaaggacaggttgcgcgtgaccagtgcagagatcaagcttggcaagaatcggacagaagctgaggtgaagcggtacacagaggagaaggagaggcttg

SEQ ID NO: 1218 - protein, 129 aa, Homo sapiens
MQGSSGVGPGPESAGRASVALSRQDNVGEEAWACALLGPCRKDLTGVRSRYTRSDSLSFGSSATGVASSVGSTAAVSSDRSTSSYRAHLGWDLGLSLPGGPQLHCPGRTTSGRSLGLCTAGAIDVSVGL

SEQ ID NO: 1219 - DNA, 962 bp, Homo sapiens
tccggacataatagacggacttgccatcctgcaaagacctgaggaaccatcctttttctcagagtcctctcaagaaaaagaagtctctgcaacttggagcaatctctaagtagctgtctgagccccctggaagagggctgttgtgggcagctgcattcagtgtgagcaacctggagtgggcctgtcctcctgctcgttcccaggttcaggcctggaagagggagttggaggcatgagagaagccactgtggggagagcacctggttcttccaaggctcggggcatgtgtggtccctggctgacttgggtgtcctctggtgtgtgcggtcagtcttcttctgactgtggatgccaaaggggaggcccttatctcttagcgcatgactcatctcttcgcgcatgactcatctctttgtgcatgactgtattattctcagcgtgtcatgtggttcctgtgcataactgagctcaatgaatatttgctgatttcagggagtgtgttagcctaggatgctacctcctgggaagccctgagaggaaagatagttaagaattcatattacccagggaggtctggccttgccctctttggctacagggaggcaatctctaggctctggaatgtcatgcctcataggggtctctttatttgcctggggtctttgggccaggtggtaccagttctgtctctagaggggctggggacgagagggcagccatgtgggcagtatttgaatgagctccagcaaaagctttggacaccgaggcctgggtgagcttctctgggaaattgacactgtgacagtgacatgtctgtgactccactgggagaggagaacagagattccacgtttgagccctccgtgctacctctttgggcttcatcacttggctgactttaatctgtactctttttgctgtattaaactttaactgtgagtataacaaaaaaaaaaaaaaaa

SEQ ID NO: 1220 - protein, 133 aa, Homo sapiens
MREEMSHALRDKGLPFGIHSQKKTDRTHQRTPKSARDHTCPEPWKNQVLSPQWLLSCLQLPLPGLNLGTSRRTGPLQVAHTECSCPQQPSSRGLRQLLRDCSKLQRLLFLERTLRKRMVPQVFAGWQVRLLCP

SEQ ID NO: 1221 - DNA, 540 bp, Homo sapiens
  misc_feature (538): Wherein n is one of a or t or c or g
aattcggcatgaggggtctggctaggctacgggccacgcgccgccgccgctgccgccgccactgtcctcttcggaggcgcgggcccgacggaaaccatgtttgtggctcgcagcatcgcggcggaccacaaggatctcatccacgatgtctctttcgacttccacgggcggcggatggcaacctgctccagcgatcagagcgttaagacacatagtggatctgtatggcgtgtgacatgggcccatcctgaatttgggcaggttttggcttcctgttcttttgaccgaacagctgctgtatgggaagaaatagtaggagaatcaaatgataaactgcgaggacagagccactgggttaaaaggacaactctggtggatagcagaacatctgttactgatgtgaagtttgctcccaagcacatgggtcttatgttagcaacctgttccgcagatggtatagtaagaatctatgaggcaccagatgttatgaatctcagccagtggctttgcagcatgagtctcatgtaagctaagctgnag

SEQ ID NO: 1222 - protein, 143 aa, Homo sapiens
MFVARSIAADHKDLIHDVSFDFHGRRMATCSSDQSVKTHSGSVWRVTWAHPEFGQVLASCSFDRTAAVWEEIVGESNDKLRGQSHWVKRTTLVDSRTSVTDVKFAPKHMGLMLATCSADGIVRIYEAPDVMNLSQWLCSMSLM

SEQ ID NO: 1223 - DNA, 873 bp, Homo sapiens
  misc_feature (1)..(861): Wherein any n is one of a or t or c or g
ncggccgcgcgggtctggcgggaccggtttggaagactttgccggcctgcagattggccttaagagaaggacggagccacatactgctgacggcccagaactggcagagagaaggttgccatggctgctgttgacagtttctacctcttgtacagggaaatcgccaggtcttgcaattgctatatggaagctctagctttggttggagcctggtatacggccagaaaaagcatcactgtcatctgtgacttttacagcctgatcaggctgcattttatcccccgcctggggagcagagcagacttgatcaagcagtatggaagatgggccgttgtcagcggtgcaacagatgggattggaaaagcctacgctgaagagttagcaagccgaggtctcaatataatcctgattagtcggaacgaggagaagttgcaggttgttgctaaagacatagccgacacgtacaaagtggaaactgatattatagttgcggacttcagcagcggtcgtgagatctaccttccaattcgagaagccctgaaggacaaagacgttggcatcttggtaaataacgtgggtgtgttttatccctacccgcagtatttcactcagctgtccgaggacaagctctgggacatcataaatgtgaacattgccgccgctagtttgatggtccatgttgtgttaccgggaatggtggagagaaagaaaggtgccatcgtcacgatctcttctgggctcctgctgcaacccactcctcagctggctgcattttctgcttctaaggcttatttagaccacttcagcagagccttgcaatatgaatatgcctctaaaggaatctttgtacagagtctaatncctttctatgta

SEQ ID NO: 1224 - protein, 251 aa, Homo sapiens
  VARIANT (247): Wherein Xaa may be any one of Ile or Met
MAAVDSFYLLYREIARSCNCYMEALALVGAWYTARKSITVICDFYSLIRLHFIPRLGSRADLIKQYGRWAVVSGATDGIGKAYAEELASRGLNIILISRNEEKLQVVAKDIADTYKVETDIIVADFSSGREIYLPIREALKDKDVGILVNNVGVFYPYPQYFTQLSEDKLWDIINVNIAAASLMVHVVLPGMVERKKGAIVTISSGLLLQPTPQLAAFSASKAYLDHFSRALQYEYASKGIFVQSLXPFYV

SEQ ID NO: 1225 - DNA, 1068 bp, Homo sapiens
ccatggcgccggcagtgccagcgggcgtcttgcgacccggctcgggcttcgccaccattcactgtgcttctcaagccacttcggcactctaatttcgccctgctctctctagacgatttttaatacctgggaaagttactccccagtctaacctaaaaaggtagaattgatggggtggggaattaacaggaaggcatgatcctcgaggataacgctgaccaggcgcttcttccaacaagcctgtttccctctctgtcgccaccgtaggagttcctacagctctcccgcacattctgtacggattgttttttagtcaagacgttctgtgcgagaggagaagttactttatgaacaccctaacaggggatcttacgacctcttccccgctctccactcagtccttttaaaaacgcgaggcaggatgaagaacgctattgaagtacattctaaaatgatcccacctgcaatttggatttttggagaatcgggatcggtgtaaaattctacatgcatacacgtatttgcacaagaatatttatagcaacgtggtttttaataggaaactatctaaatgttcattacaagtgaattacataaagctcaatacatccatactacgaatcactgaagagctgctaaaatagatgaaatatatttataatggcatgaacaaccgacacaagacagttgcagagtaatgtgtatttgtgattacatttatgtttttaagttatacaaacgcgtatgtgcctatgtgtatgtaaattcataggaagacaaatcagaggacggtggttacctggggaaaagcatgtgttgtcctagggtatagctttgcaggagagcttggcagagcctgccaaacctgatcagcttttccacctctcagctactgcttcggctccccagcctcataaactctcagctgccacattacaaatcagcagatgtcttgaggtgaaatgtggtgccaaatgtcaagctcaactttttggatcatctctcctgaatttcagttcctcgaatcctcactgtcctgggtctccaatgccttcaaaaaggattttc

SEQ ID NO: 1226 - protein, 67 aa, Homo sapiens [sequence omitted]

SEQ ID NO: 1227 - DNA, 836 bp, Homo sapiens
tgatcatgtctctggacttgccctgtgatgctggacaggagctgacagccgggatctgggagcaataccttcaagatagcacagcaaggtttagctgggcttgatctgcagtggtgcagaggctgcaaaggaggggcgattttgttatgtgggaaataagcccacctacttgtggggactcaagatgacttgtttggattctgcatatgcaaattgaagatctcctcctcttcttgagagttccaagacccacaactcacttttgcccgtgctgagacatggccccagccagaaggaatttacagtccagtcaaaactgcctagaagtgtgacagcagctgagttggagggaggcagctgaaccaagaaaaccttatcagcactatttgaaacttttatctcatctggcttggcgcctgaggttctcccattaggaaattgaaggcgtgtgggagagcatatggaacattccttcaaatgcatttggtcatagaagcctttactggaaaatacctcccatggctagtaaaaagcaaaaatgactgagaagcactggtttatctctgccaagaacaaaatctaggaggaggtacctgtttcctccacactgggtaaatctagtggcccaatctgctgtgcaccttcccacccaggtgcgttctggggagggttgagctggttgagtgtatcaagagttgattcctttggatggctgagtgctattccataagatggatgtagcacagtttaactgttcacctgctgatggatggctgagttatttctagatttttggctattgctattaaagctgtaatgaacattcacgtaaaaaa

SEQ ID NO: 1228 - protein, 105 aa, Homo sapiens
MHLKECSICSPTRLQFPNGRTSGAKPDEIKVSNSADKVFLVQLPPSNSAAVTLLGSFDWTVNSFWLGPCLSTGKSELWVLELSRRGGDLQFAYAESKQVILSPHK

SEQ ID NO: 1229 - DNA, 630 bp, Homo sapiens
  misc_feature (1)..(618): Wherein any n is one of a or t or c or g
nagatctgtttttacagggagttaaactcgaagaccaccttgaaatttgtgcacacatcttttcatggggtcggacatgactatgtgcagttggcttttaaagtgtttggttttaagcctccaattccagtaccagaacaaaaaaatcctgatccagacttttctaccgttaaatgtccaaatcctgaagaaggagaatctgtgctggaactttccttgagactggcagagaaagaaaatgcccgggtagtgctagccacagatcctgatgcagacagactggcagcagcagaacttcaggagaatggttgttggaaagttttcacagggaatgagttggcagctttgtttggatggtggatgtttgattgctggaagaaaaataaatcaagaaatgctgatgtgaagaacgtttatatgttagccaccacagtctcttctaaaattctgaaggcaattgcacttaaagaaggatttcattttgaagaaacattaccaggttttaaatggattggaagtaggataatagacctcctggaaaatgggaaagaagtcctttttgcctttgaagagtcnatttggttttcctctgtgggancttcagttttgggataaagntgggggtgagtg

SEQ ID NO: 1230 - protein, 204 aa, Homo sapiens
  VARIANT (1): Wherein Xaa may be any one of Gln or Glu or Lys
  VARIANT (200): Wherein Xaa may be any one of Asn or Ile or Ser or Thr
XICFYRELNSKTTLKFVHTSFHGVGHDYVQLAFKVFGFKPPIPVPEQKNPDPDFSTVKCPNPEEGESVLELSLRLAEKENARVVLATDPDADRLAAAELQENGCWKVFTGNELAALFGWWMFDCWKKNKSRNADVKNVYMLATTVSSKILKAIALKEGFHFEETLPGFKWIGSRIIDLLENGKEVLFAFEESIWFSSVGXSVLG

SEQ ID NO: 1231 - DNA, 1224 bp, Homo sapiens
  misc_feature (1)..(800): Wherein any n is one of a or t or c or g
nntgcatatcccaagagggcattccaaggagaaagaaaaaggaagtgttaagcctacgaattaatcagactggtagaggacgaaaaagcagaacaattctccatatcagaaaactaatatacaaacaggaaaggtcaacaaatacaacccccatggcttttttaatgttgataagaagtaagtccagaattctcattttatttctcatccttgagagaaaacattttccacaaggcaggtcaagattttatatgtttatttgtggttagaaggaaacgaaaactaataagaaagaacatagttaagagagagctgaacatgaaatgggtttattattgtcatttgaaaaggaactaataagtaaatattgttttacttatttctcagttttaatttctgatatggtaagcattaatacaatccacataagcaagaattcttcggagtcctcaataagtttttagagtttcagggggtcatgagactgaaagttgacaaccaccgtccttaaataaagacaactttacacccaccctaacaaacattaaaaacaaacaagattccaaaggatcaagtcgacccaatagtaactcaactgcctgccaaaacacacctcaatgctctttgaactttaggacaaggaatattatcagcgataaagatggagatttcataatgatgaaagaattatgtcattaaaaatacataataatccttagcatatttgcatataattatacagcttcaaaatacatgaagcaaaccntgacagaactaaaaagagaaacaaaaaactatnnaattatatttggagatttcaacaatcatctctcacttgttgataggacaaagaccaaaaaaaaaaaaaatcagcaagtatacagaagacttgaaaaaaactgtcaaccgatttgacctatcatttatagagtaatattccccaaaatagcagaatgtacattattttcaaatatacaaggatcatttaccaagataaaccatattttgggccataaaacatttaggattgaaaatacagagcaaattctctaaccacaataaatttaaaaaatcgatagccaaaagataactgaaaactcccccaaatgtttgaaaattaacacatttctagaaaagtcatagatcaaaattaaattacaagggaaatctgacactattttgaactacgcgttcatgaaaacacatcaaaacttgtgaaatgcc

SEQ ID NO: 1232 - protein, 71 aa, Homo sapiens
  VARIANT (23): Wherein Xaa may be any one of Ler or Met or Val
  VARIANT (34): Wherein Xaa may be any one of Ala or Arg or Gln or Glu or Gly or Ile or Leu or Lys or Pro or Ser or Thr or Val
KYIIILSIFAYNYTASKYMKQTXTELKRETKNYXIIFGDFNNHLSLVDRTKTKKKKNQQVYRRLEKNCQPI

SEQ ID NO: 1233 - DNA, 2382 bp, Homo sapiens
gggaacgggactcggttcccaagccgtcggtgctgttcctccacccagacctgggcgtgggcggcgctgagcggctggtgttggacgcggcgctggcgctgcaggcgcgcgggtgtagcgtgaagatctggacagcgcactacgacccgggccactgtttcgccgagagccgcgagctaccggtgcgctgtgccggggactggctgccgcgaggcctgggctggggcggccgcggcgccgccgtctgcgcctacggtgcgcatggttttcctggcgctctacgtgctgttcctcgccgacgaggagttcgacgtggtagtgtgcgaccaggccatttgcatcccactgtccttgtgttcggagccaggccacaccgtcctcagcagtgtcatgtgttaaaaacgccaagctgaatatatcatgcccctattaaaacttgtacatggctccccattggtttttggagaaaagttcaagctttttaccttggtgtctgcctgtatcccagtgttcaggctggctagacggcggaagaagatcctattttactgtcacttcccagatctgcttctcaccaagagagattcttttcttaaacgactatacagggccccaattgactggatagaggaatacaccacaggcatggcagactgcatcttagtcaacagccagttcacagctgctgtttttaaggaaacattcaagtccctgtctcacatagaccctgatgtcctctatccatctctaaatgtcaccagctttgactcagttgttcctgaaaagctggatgacctagtccccaaggggaaaaaattcctgctgctctccatcaacagatacgaaaggaagaaaaatctgactttggcactggaagccctagtacagctgcgtggaagattgacatcccaagattgggagagggttcatctgatcgtggcaggtggttatgacgagagagtcctggagaatgtggaacattatcaggaattgaagaaaatggtccaacagtccgaccttggccagtatgtgaccttcttgaggtctttctcagacaaacagaaaatctccctcctccacagctgcacgtgtgtgctttacacaccaagcaatgagcactttggcattgtccctctggaagccatgtacatgcagtgcccagtcattgctgttaattcgggtggacccttggagtccattgaccacagtgtcacagggtttctgtgtgagcctgacccggtgcacttctcagaagcaatagaaaagttcatccgtgaaccttccttaaaagccaccatgggcctggctggaagagccagagtgaaggaaaaattttcccctgaagcatttacagaacagctctaccgatatgttaccaaactgctggtataatcagattgtttttaagatctccattaatgtcatttttatggattgtagacccagttttgaaaccaaaaaagaaacctagaatctaatgcagaagagatcttttaaaaaataaacttgagtcttgaatgtgagccactttcctatataccacacctccctgtccacttttcagaaaaaccatgtcttttatgctataatcattccaaattttgccagtgttaagttacaaatgtggtgtcattccatgttcagcagagtattttaattatattttctcgggattattgctcttctgtctataaattttgaatgatactgtgccttaattggttttcatagtttaagtgtgtatcattatcaaagttgattaatttggcttcatagtataatgagagcagggctattgtagttcccagattcaatccaccgaagtgttcactgtcatctgttagggaatttttgtttgtcctgtctttgcctggatccatagcgagagtgctctgtattttttttaagataatttgtatttttgcacactgagatataataaaaggtgtttatcataaaaaagaaacagtattagattttggtctccataatctattttggtattgttacgaacatggatatgacaaccaaactggaaatcagaacactagggtaaagtggatattgaaatgaagcaagaatattgtcacacatgtgttgtgcatcttgtttagggtatatttcttaatgtcatctaggtcattagttttgttaatatttgtgttgtcttgaccaagctcctactaagtataggacacaaatgttttttatcttccaaggcctggctcaaatgccactgctgcaaagctttctttgaccctctggccacctcccaagccagaagttatcttccccctccatgtactctagccttttcatgacactggatattttcgtgacactgacttatagttcactgtttacctggttggtctaacagca

SEQ ID NO: 1234 - protein, 323 aa, Homo sapiens
MPLLKLVHGSPLVFGEKFKLFTLVSACIPVFRLARRRKKILFYCHFPDLLLTKRDSFLKRLYRAPIDWIEEYTTGMADCILVNSQFTAAVFKETFKSLSHIDPDVLYPSLNVTSFDSVVPEKLDDLVPKGKKFLLLSINRYERKKNLTLALEALVQLRGRLTSQDWERVHLIVAGGYDERVLENVEHYQELKKMVQQSDLGQYVTFLRSFSDKQKISLLHSCTCVLYTPSNEHFGIVPLEAMYMQCPVIAVNSGGPLESIDHSVTGFLCEPDPVHFSEAIEKFIREPSLKATMGLAGRARVKEKFSPEAFTEQLYRYVTKLLV

SEQ ID NO: 1235 - DNA, 1135 bp, Homo sapiens
tttttttttttttttttttcattcaacactagtaattttatttcaaaatataaatatttcacattaataaagaagttacatcagtaggttgtcaaagcaagttagctaagaaacagcatttgtgtgagaacagagggtatttattgtattcgaatattcttttttacttttgaattgcctccttcacctgagaacccagggatgatacattttcaaagagttatgtaagcaattacaactctatatcaaatcttagttcaaaatcaaattgtactggaaatacacttcagttacctaaataagtggcactgcaaagggcaaagaagggttttctttgggatggctacaatgagagttacatctgctgggtctctgcaataaaaaataaatgatatttgataataagccaaaattatcaggatttgcttccatacttttcactgtaaaataaaaagctagcaaaaagctagtaagaaaccagatgtctagtaaagaactctggacttggagtcagaagttctgcaactaaattctggctccatcattttgtggtataaacttaggggaatatcaccaaaaacttttcagagcctccagagcccccccatctgtacaataaggataatattgtctgtctcacagggctgttacaaaaggtgtctgaaaactataaagtgccatacaaaagcattattaaaatgtaatatcaatatatcaccactgtatttgcacattagttgatccttgaaaaacctgcaaaattaaacacaatactgattttacacaccacaggtggaaaagaatctctataccttaagtatagctctaaacagcaaatatacttgctttctggacttcaagatttattacacactacatggtaccacagtaatagatctgccattcagtatttccattagggatgtcttctcaaagagttgtaaacttgatcaagggccatgtttctcaaaggaccctgtagtcctttgagatgctctgaggaataaagaaggggagtgcagtctaaggtcaaacagtgtttgtccccttttataaattcacaatgtgtaatagcatgttcaaaactcttagaagtcctacagtaaggaaacaaactcagcattccttcatttta

SEQ ID NO: 1236 - protein, 68 aa, Homo sapiens
MLSLFPYCRTSKSFEHAITHCEFIKGDKHCLTLDCTPLLYSSEHLKGLQGPLRNMALDQVYNSLRRHP

SEQ ID NO: 1237 - DNA, 1361 bp, Homo sapiens
gtcttgtaagcaggcagaaaatctacctctaattttaacactaatactttgaaacccacaatcaaatagagtgaattctccaagttacataagcaaggaaaacattatttgaaatatgccatgttttcgttgcctttggacacctcatcattcaactctaattttaccgagtcccgggatttgtactgtcccattgtacttgcaatctacaatttatataatagaaaaacaaccaaacccattcatacaaggatctgaagttataaggttaagggcagaaagtttcccataagtataaaacatttccaggtcatgaagagtagtttaggttgagtgacaaaagcctaggtgtggttgtttttcattcattttgcatctcacaccaagacatttttgctgcaaggtcatctgctgcttaaaatgtacaattaggtatataaaataagtacaatggtgaaaacacaaagccaggtaaagcagcatgccccactaaatttttcagtatacatagggacagacaagtgagttttggttgtatctaaatattttaatttcaggttccttctgtgccctgggccactatttcccaggggtgtgacagagatgcctgccagatccatatcaactagaagtctgatttctgttgctgcccttcctcagcaactatggcagtatacttttatcaccaagcaccactcccttgtccctgaatcacattttaatagagtacaatatcttctgtacaatatttctgaaacacttatgtctgaaatatatgctgtattgtatgttaacccatgacatatatgaactacaaggcttgcataatcagtgagctagtggataaatcaagacaggagcaaatgggagaaagatgaataaacaaatgaaaaaagatgaataaatgaataagagagatgaataaacaaatttacattacatgtgatagttatcatggtatggccttcatgacaagatggatgagaatatcactgataggatattagccttctttcatatctttatattgaaatatgggctttacttcaatttgaaggtctttcatgaacaataaaagagagtagaaggactgtctgagaaggcaggagacatataaaacagatgactgaaagactgactagctcctggaaagggaaacatttggaacatccagagtaagggcaaatgggcttctaccagcacaacaaagagcctccaggtggcaacatggaagcaggttatcagagaaataaatgtgcaaattccttatttacaatgactcacttaaccccacaaacatgtttcactgctgccttccccagttgtcgcttatgtactgttgttacctttcagttacatgc

SEQ ID NO: 1238 - protein, 65 aa, Homo sapiens
MPARSISTRSLISVAALPQQLWQYTFITKHHSLVPESHFNRVQYLLYNISETLMSEIYAVLYVNP

SEQ ID NO: 1239 - DNA, 942 bp, Homo sapiens
gctagcactaatttagacaatgaagctatgcagcaagattgtgtatttgagaatgaagaaaatacccagtctgtaggtatattgttagagccatgcagtgaccgtggtgatagtgaagatggctgtcttgagagggaagaatatttgttatttgacagtgataaattgtcacacttgattctggattctagtagcaagatatgtgatttgaatgccaacactgaatcagaagtaccaggaggtcagagtgttggtgttcaaggggaagcagcgtgtgtcagtattccacatttagatctgaagaatgtttctgatggtgataaatgggaagagccatttcctgcttttaagtcttggcaggaggactctgagtctggagaagctcagctgtctccacaagctggaagaatgaatcatcaccccttggaagaggactgtcctccagtattatcacaccgcagtttagattttggtcaaagccagcgtttcctacatgatccagaaaagttggattcctcatctaaagcactgtcttttactagaattcgaagatcatcctttagttcaaaagatgaaaagagagaggacagaacaccttatcagctggtcaagaaacttcagaagaaaatcagacaatttgaggaacagtttgaaagggaaagaaatagcaagccctcctacagtgatattgctgccaatccaaaggtattaaaatggatgacagagcttacaaaactgcggaagcaaattaaagatgcaaaacacaaaaattctgatggagaatttgtacctcagacacgtccacgtagtaacacacttccaaaaagctttggctcttctctagaccatgaagatgaagagaatgaagatgaacccaaggtcattcagaaggagaaaataccatctaaagaagcaacccttgaacttattcttaaacgactg

SEQ ID NO: 1240 - protein, 314 aa, Homo sapiens
ASTNLDNEAMQQDCVFENEENTQSVGILLEPCSDRGDSEDGCLEREEYLLFDSDKLSHLILDSSSKICDLNANTESEVPGGQSVGVQGEAACVSIPHLDLKNVSDGDKWEEPFPAFKSWQEDSESGEAQLSPQAGRMNHHPLEEDCPPVLSHRSLDFGQSQRFLHDPEKLDSSSKALSFTRIRRSSFSSKDEKREDRTPYQLVKKLQKKIRQFEEQFERERNSKPSYSDIAANPKVLKWMTELTKLRKQIKDAKHKNSDGEFVPQTRPRSNTLPKSFGSSLDHEDEENEDEPKVIQKEKIPSKEATLELILKRL

SEQ ID NO: 1241 - DNA, 861 bp, Homo sapiens
aatcttaaaagcttatcaacaaagctcctgttctgcaggcatcaggaaagttgagtgtaagatggaaaaagcaaacagcctatttacaagtggaaacacattggttctgatcactcctaacttgctgggtgatcatacatacatcaacatgaaggtgtgacatcagaatcatgagcaccatggctgcagttgtgtgatccaaggctagttggcttggtagctgttggcagcagtttcccttggtcagaggcctccttgctatctatcgctgctctcttcttgtcatccttaaacattcagtcatgttcccaggtctgaggggagcaatggccagaccagtttcagtatctctggcaacagaaacaaggattgaaatggtggtagttaagagtgcagacacatctggggtgcaacgtctgcatcatcctggtggctagccagtgcggggaggccctgccctgggataccagttgtgacaataaagggatggccctcctggcttcagcatcctgcaggtagagcagcctcattccttcacaagatggaaggcaggtgaggatgtcaggatgagatgggaccaggtagccgaggacagtgaggcatgtctgagccacttgaggggcagctgaacagaaggatgtctgtgtgcatcaaccgagcagattgtgcgcacactcgtttccgaactgcctctccccaaagaatgtgaggcattgtcaccttgttacagctatgtgaagcagactgtcacaacttttcctggttggcagcgggggccatcacctgtggcctctgagaccgccccatttacaggaatctgcactgggtctcagtgaatgaacgtatggtagatttttattt

SEQ ID NO: 1242 - protein, 62 aa, Homo sapiens
MRLLYLQDAEARRAIPLLSQLVSQGRASPHWLATRMMQTLHPRCVCTLNYHHFNPCFCCQRY

SEQ ID NO: 1243 - DNA, 606 bp, Homo sapiens
  misc_feature (1): Wherein n is one of a or t or c or g
nacataattaatattttctccgttgcatctggtcatctctacgaaagatttcttcgcataatgatgctatccgtgctgaagaataccaagactcctgtgaaattctggttcttgaagaattacttgtcccccacatttaaggagtttataccttacatggcaaatgaatacaatttccagtatgagcttgttcagtacaaatggccccggtggcttcatcaacaaactgaaaaacagcgtatcatctggggttacaagatcctcttcctggatgtacttttcccactagttgttgacaagttcctgtttgtggatgctgatcagattgtacgaacagatctgaaagagttaagagatttcaatttggatggtgctccttatggttacactcctttctgtgacagccgaagagaaatggacggctacaggttctggaagtcagggtactgggccagtcatttagccgggcgaaagtatcatatcaggtactgaaaagaagcactcctaacactgttacggggttttccttaaaattgattttgtgtggttaaaattgtgaataggtaatacattggtatggttgaaaaataaaaatgataaaaaata

SEQ ID NO: 1244 - protein, 163 aa, Homo sapiens
  VARIANT (1): Wherein Xaa may be any one of Asn or Asp or His or Tyr
XIINIFSVASGHLYERFLRIMMLSVLKNTKTPVKFWFLKNYLSPTFKEFIPYMANEYNFQYELVQYKWPRWLHQQTEKQRIIWGYKILFLDVLFPLVVDKFLFVDADQIVRTDLKELRDFNLDGAPYGYTPFCDSRREMDGYRFWKSGYWASHLAGRKYHIRY

SEQ ID NO: 1245 - DNA, 432 bp, Homo sapiens
gaattcttgctgtgagtggtttttccttccctgccattggtgcgactgtttcccccttccgtcaaattgctgtctagatgtttctctctgaccccaattttctcggagtttgggattatcaatctaaaatcagaggcagggaggaacttggattgtccttcagtaaaattccactttgatgcgcaaagcgaacttgaatttctgcttggcctaccacaggcctgcaacatgcactttctcctcgaggtgagaaggtctttttctctccactctgaaacaccgctgcctgcaccttttgctgagtttagagtagcatcatactttctgccacgaatgccacaaatactgccttttcaacttggttttgtaaaatgtaatggtactaaatccgccaaagggataaagcacccttactttggatttgccagtcca

SEQ ID NO: 1246 - protein, 76 aa, Homo sapiens
MLQACGRPSRNSSSLCASKWNFTEGQSKFLPASDFRLIIPNSEKIGVREKHLDSNLTEGGNSRTNGREGKTTHSKN

SEQ ID NO: 1247 - DNA, 647 bp, Homo sapiens
cggccggaccgctggagccgtgcgggctggggaagaaggtttatgggatgcaggataatggagcatgctctatctgggacattgctagtcttatgacagagggagaagacagcgatgagttttcgaagaactccaggaagtggctgcagagcaaagtaggatcctgatactgagctcaagtgattcagaatgaaaagaccttggcacagacctgttaaggaagctccatataaggtgaagaaaacaacatgctcagccatgtccttgccttctgcacacggtagtgcattcactgcctgagaattcaaggctaaaacaaaaagaggagcttttgttccaacagataagtacttacctttttcaaaaaatgcataagctgtcctgggtgtttagcagttattcgcacagctttccaaagactcacagcatttaaaagctaactctacagagattcaacagcttcttccagatcccaccacagtggaaaagaactccggtgtcctggctccctgtccagctcttctctctccccttccagctgccagttcagctttaagaagttcattctccacattcagatgcaggcaaatgcgtttgacttgagcatattgatttcaggcaggtgagagtggatgtagcgattcagc

SEQ ID NO: 1248 - protein, 86 aa, Homo sapiens
MAEHVVFFTLYGASLTGLCQGLFILNHLSSVSGSYFALQPLPGVLRKLIAVFSLCHKTSNVPDRACSIILHPINLLPQPARLQRSG

SEQ ID NO: 1249 - DNA, 860 bp, Homo sapiens
attaaatagaataaagttaagtgtttattgggcttaaagatggggctcttcgaccgtttggctacataaatgtgctagagcaacagagcgagcggctcgcaggccaatctgccagtgttggttcgctgggaaagggggcgaaaccgaggacacttttaagctgaccagattggggttggctgccctacctgcggggtggctgtggggagttaccctcagctctgaagatgcctccccttaactgaaaacgtctttggccggtaaagccgcccacgcgggccgcgcctcttccaagtctgcgcaggccgcctttgtccctgcagtgactgccgcgagggcaaggagcgagcgcggagaatgtcaccagagtttattgaagtgtttataagccgagaactctggtttttgcggggaggcggagtgcttatccaacttcactggagcaaaaattctgtgggcctagaatcccaggaggcctctgcgcaccctcgctgggcgagccggagtcccggcctctcccgaggatacgaagccgggggtcaaagcttgcccccgcgccatactcctttgcctcgtcgaactttcagcacggtcccattcagtctggaatttcagctcaagacccgggccaaagttccctgcggagttggtatattaacatccgcgttcgcttttccaagggggttgaggggctccggacaacttctagcagctcccgggcgccctccagggaccgcccccacccagtttctgcgcagctcgggcccccaccgtcgcctcgcgacctcagatcttggcctcccacggccgcgctcagggaagctattgcaaatgatgcgccccgggtgctttcgttttgc

SEQ ID NO: 1250 - protein, 167 aa, Homo sapiens
MSPEFIEVFISRELWFLRGGGVLIQLHWSKNSVGLESQEASAHPRWASRSPGLSRGYEAGGQSLPPRHTPLPRRTFSTVPFSLEFQLKTRAKVPCGVGILTSAFAFPRGLRGSGQLLAAPGRPPGTAPTQFLRSSGPHRRLATSDLGLPRPRSGKLLQMMRPGCFRF

SEQ ID NO: 1251 - DNA, 513 bp, Homo sapiens
ttcatccaaatcaaggctgtatttatcgtcactgattgacatgggaacagaatatttaaaacaaacagggtccaccgtggaaatgtggctgaaacacagaactgagcaaagcaagtggctcgacggctgaccccgaaggctgggaatcccggcaggggacacagcccagacatcggggaacacaaaaggccagtcctgaagcccacaggagccgcccaggagtgctgttctgctggcccaggggctctgctggggggacccaacccctccacggacccaggggctgggaggtcgctggcggaaccttcctcccccaaccagcagagccgccgggaagcgcttgcatagttgaaggaaagttgctgccattaaacttctgataatgtttacagccagcagcgcctgggtttttgtgaccatgttagacaaacaaccagaggggtttctggaaacggtttttataaagtctatctagattaagaatttagtaacgtcatatatttatatcaacag

SEQ ID NO: 1252 - protein, 140 aa, Homo sapiens
MVTKTQALLAVNIIRSLMAATFLQLCKRFPAALLVGGGRFRQRPPSPWVRGGVGSPQQSPWASRTALLGGSCGLQDWPFVFPDVWAVSPAGIPSLRGQPSSHLLCSVLCFSHISTVDPVCFKYSVPMSISDDKYSLDLDE

SEQ ID NO: 1253 - DNA, 740 bp, Homo sapiens
  misc_feature (1)..(2): Wherein any n is one of a or t or c or g
nncctaggacgttccaatccattggctgttcttcgagtagctgggccctgggggcctggtctggtgcagcgattccggccggacttcaaacgcaagtttgcagacttctttgaagatgataccatatcagagtatatttaccactgcaacgcacagaatcccagtggtgagacagcattcaaagccatgatggagtcctttggctgggcccggcgccctatgctggagcgaattcacttgattcgaaaagatgtgcctatcactatgatctacgggtccgacacctggatagataccagtacgggaaaaaaggtgaagatgcagcggccggattcctatgtccgagacatggagattaagggtgcctcccaccatgtctatgctgaccagccacacatcttcaatgctgtggtggaggagatctgcgactcagttgattgagctgctctctgaagaggaagaggagaaagccagagagtcactcttacctccctgtctgcttactcacccactctgtcctttcctcaccaactaacatgtgccagccaggcagagtcttgtgctgttcccagaacaggacgacagtgaaaagaacactcttgaccctacactgaaggctgaaggcagaagccacaagaggccttgagtgccacccccagggaagacataagggttgaacaatgccacccatccacttcttgccaaggtgttacccagatggtgggggatgttaagggatt

SEQ ID NO: 1254 - protein, 146 aa, Homo sapiens
  VARIANT (1): Wherein Xaa may be any one of Ala or Arg or Asn or Asp or Cys or Gly or His or Ile or Leu or Phe or Pro or Ser or Thr or Tyr or Val
XLGRSNPLAVLRVAGPWGPGLVQRFRPDFKRKFADFFEDDTISEYIYHCNAQNPSGETAFKAMMESFGWARRPMLERIHLIRKDVPITMIYGSDTWIDTSTGKKVKMQRPDSYVRDMEIKGASHHVYADQPHIFNAVVEEICDSVD

SEQ ID NO: 1255 - DNA, 515 bp, Homo sapiens
atcactattcgccaaattcccatcagcacatagactggaaaaactataaaacttacaaagagtatattgataacagacgattgcacataggttgtcggacaatacaagaaagattagatagtttaagagcagcatctcaaagcacgacagattataaccaggtcgtccccaaccgcactactttgcagggacgacgtcgaagcacctctcatgatcgagtgccccagtctgtccagatacggcaacgcagtgtgtcccaagaaagactggaagattctgtgctaatgaagtattgtccaagaagtgcatctcaaggagcactgacgtctccatctgttagttttagtaatcatagaactcgttcatgggattatattgagggacaggatgaaaccttagaaaatgtcaattctggaactccaatacctgattccaatggagagaaaaaacagacttacaagtggagtgggtttactgaacaggatgatagacgaggtatttgtgaaggacctagg

SEQ ID NO: 1256 - protein, 77 aa, Homo sapiens
MKYCPRSASQGALTSPSVSFSNHRTRSWDYIEGQDETLENVNSGTPIPDSNGEKKQTYKWSGFTEQDDRRGICEGPR

SEQ ID NO: 1257 - DNA, 1320 bp, Homo sapiens
ctgaaattatgtgcataatgagtaacctaaagtaggacattcatacattatgtagaactacttttctgcaacacaaaccttgtaaaatacatatataaatcactataacttttaactgtccatatcccctgtagagaattatgaggagcaatagatctgcaaataatgaggactgatgtaaaaatcaatagaaagcattttgaatatgatttaagagcatgtgaatgcttttagatggaatgctgttcccttgaagttatggctgagctgttcttagaactggtctactcaattcacagaaaacataggtcatgccttatctatgggggaacaccctcccagaatttacctgtgattacctgtgctgcatattactttgcaatggcctcatctcagagaatgaaagagggtcacattgttctgaaactctctgcagtcttccaaccaccacaaggccatggatgtgggggtctattccagacagacttaagggctcaagtggaacctgccatctcccattccactgaaggactgtccaagagatttagtgcaaggtacactgcagtagtgaattcccccaggcacttgaaagtgactgcctaatccctacaattactagccttgttggagattatgcagcccacaagtacagactagtataaagcaaaaggacaaaggaacccccaccctccaccccacccattaatgacttgagtgggcaagaagaagtgatggccttccttgcctaaaacagtagctttgtttttagggggtgggaaggtaggatgtggagtgacatggttctatcctttacttatgagactcagaaatatatctacaaagccagatgctctgtcttcatatttgcagacatctagaccccttgctaaaaacccactgaagttttttttttatgttctttgacccacaccatcaacactaccctcaaatctaattgccctacagcatattctatcatgtggactaggttcctggaaagccggaactcatgattctttttcaaactgccagaatagaagggagagagaaaacatttctaccctttgatcaccagtgtgaacagaatccggaatgcagtttcagcgtgacctgcagtcattcatgttcattggatttgacagatggaaacccaaggttatcgaagattggaaggttatcattgtgaagaagtagctcaaaggactccggtttctgtctacaagtgtgatgtctccatgaagaagacttagtatggatttgggtgggtaagaaagcatttaaacgcccaggaaaggacatgattaaagttgaccttttaaa

SEQ ID NO: 1258 - protein, 122 aa, Homo sapiens
MECCSLEVMAELFLELVYSIHRKHRSCLIYGGTPSQNLPVITCAAYYFAMASSQRMKEGHIVLKLSAVFQPPQGHGCGGLFQTDLRAQVEPAISHSTEGLSKRFSARYTAVVNSPRHLKVTA

SEQ ID NO: 1259 - DNA, 530 bp, Homo sapiens
  misc_feature (527): Wherein n is one of a or t or c or g
aacacgagtcttttggctattagtctaatgcattttctaccacacccactgcctctgagagcagtgatgctttggagaagatccatcaaagaatccatactgtaattggagacatagtcttatatgtcaatacgtatatgtcaatactacttggacacagcccttggaaatcacctgactgtaccaatacaaaccatactttggaaaccaccattctctgggtagaaacatctatggactatcaattttgtcagaaatcagtgaacaagtgaagagtcaattttttttagtcaaatattttctcttctcaatgaagagaagactaggacagtgacattttgaagcataccttttatactccttgtggttcttatgacagtctgtgatggtagtaggtaaagtagctaaatccttggatttcagagaggggagaacatgtggaaagaaactgaacgacttatccaagttcacatgacaagttagtggcagaaccattattgcaatccaggacttaagacatcttgtcntag

SEQ ID NO: 1260 - protein, 72 aa, Homo sapiens
MVLPLTCHVNLDKSFSFFPHVLPSLKSKDLATLPTTITDCHKNHKEYKRYASKCHCPSLLFIEKRKYLTKKN

SEQ ID NO: 1261 - DNA, 479 bp, Homo sapiens
  misc_feature (1): Wherein n is one of a or t or c or g
ngtcgacatacacactgggtacgctgtgccaaattttcacccgatggaagactaattgtgtcatgtagtgaggataaaactattaaaatttgggataccacaaataagcaatgtgttaataacttctcagattccgttggatctgcaaattttgtggactttaaccctagtggtacatgcatagcttcagcaggttctgatcaaactgtgaaagtctgggatgtaagagtgaacaaattactacagcattaccaaggtaacaattttccctaacaaaaaattcagttaccgaatggactccttttggaaggactgattctccttgttggtgtggtttggctgtcttacttggggtcatgggctgccttggaacaggctagagaatagtataattagctcccatcaacagcagggtctcagaagctcaaggacagcaggaagtgaagagaccttaaaaatgatgtgagggctggtttaaa

SEQ ID NO: 1262 - protein, 90 aa, Homo sapiens
  VARIANT (1): Wherein Xaa may be any one of Arg or Cys or Gly or Ser
XRHTHWVRCAKFSPDGRLIVSCSEDKTIKIWDTTNKQCVNNFSDSVGSANFVDFNPSGTCIASAGSDQTVKVWDVRVNKLLQHYQGNNFP

SEQ ID NO: 1263 - DNA, 690 bp, Homo sapiens
gcggccgccagggttggtggggtcaaagggcgtcagatggggctgggtctgggggtgcgtagtgagagtctgggggactcctgctctcctctttctgaggacagcctctccttcaggagtttcccggtcttcagcccgccggggcccccacggaagccccccgcgctctcccgagtgtccaggatgttttccgtggctcacccagccgccaaggtgccgcagcccgagcggctggacctggtgtacacggcgctgaagcggggcctgacggcctacttggaagtgcaccagcaggagcaagagaaactccaggggcagataagggagtccaagaggaattcccgcttgggcttcctgtatgatctggacaagcaagtcaagtccattgaacgcttcctgcgacgactggagttccatgccagcaagatcgatgagctgtatgaggcatactgtgtccagcggcgtctccgggatggtgcctacaacatggtccgtgcctacaccactgggtccccgggaagccgagaggcccgggacagcctggcagagcccactcgggggcatcgcgagtacacggagagcatgtgtctgctggagagcgagctggaggcacagctgggcgagtttcatctccgaatgaaagggctggctggcttcgccaggctgtgtgtaggcgatcagtatgagatc

SEQ ID NO: 1264 - protein, 230 aa, Homo sapiens
AAARVGGVKGRQMGLGLGVRSESLGDSCSPLSEDSLSFRSFPVFSPPGPPRKPPALSRVSRMFSVAHPAAKVPQPERLDLVYTALKRGLTAYLEVHQQEQEKLQGQIRESKRNSRLGFLYDLDKQVKSIERFLRRLEFHASKIDELYEAYCVQRRLRDGAYNMVRAYTTGSPGSREARDSLAEPTRGHREYTESMCLLESELEAQLGEFHLRMKGLAGFARLCVGDQYEI

SEQ ID NO: 1265 - DNA, 195 bp, Homo sapiens
  misc_feature (167)..(168): Wherein any n is one of a or t or c or g
ccaaaccctatcatgcaaggagtgagtttgaagatatgtacacaaactcaaaaatctgtaaactttaggacatttttatttttaactgtattttctacttttcatccaaacatttgtcatcatggactcagaagaatccaagattttgatctagatttaaaataacnnaaacattacccagggatttttgtttaa

SEQ ID NO: 1266 - protein, 50 aa, Homo sapiens
MQGVSLKICTQTQKSVNFRTFLFLTVFSTFHPNICHHGLRRIQDFDLDLK

SEQ ID NO: 1267 - DNA, 929 bp, Homo sapiens
  misc_feature (1): Wherein n is one of a or t or c or g
nagcggccgcggtgggcgccgcccgtctcgggccccggacccagtccgcatccgtcgtccggcccgctgctgccgccgcgcttctacccgcgctacgtgctaccgctcgccttcggcaagtacttcgcgtccgtgtcagcgcacgtcagcatctggaaggtgcccgtgtcctatgcacacaccgtcaaggccaccatgcccatctgggtggtcctcctgtcccggatcattatgaaggagaagcagagcaccaaggtatacttgtcactcatccccatcatcagcggtgtcctgctggccaccgtcaccgagttgtcttttgacatgtggggactcgtcagcgccctcgccgccacgctgtgcttctcgcttcagaacattttctccaaaaaggtcttgcgagattcacggatccaccatctccggctgctcaacatcctgggctgccacgccgtcttctttatgatccccacctgggttctggtggacctctcggctttcctggtcagcagcgacttggtgagttgtacagcaccaagaacacgccattttcttggctagttccagaataggtgctttgttgaggagctgtagctgcatgttaacattgtggtatcttttgggcacctgacagccagcgtttcagcagtcagtcctctgtaatgctcacggtgacgatgcacgccatcgaggaagtgggtttcctgtgtatttccttctctggtgtgcttgatcccaggtgctgatagctgctgtgtgtgcgccagtagcgtcaaggaagagaaggtgactctttcacctcctgacagtatagtccagatagcacattgactttttatttttactcattttttattttaaatgtttattttttagagacagaacctcgctctgcactccagcctgggtgacagagggagactccgtgt

SEQ ID NO: 1268 - protein, 186 aa, Homo sapiens
  VARIANT (1): Wherein Xaa may be any one of Gln or Glu or Lys
XRPRWAPPVSGPGPSPHPSSGPLLPPRFYPRYVLPLAFGKYFASVSAHVSIWKVPVSYAHTVKATMPIWVVLLSRIIMKEKQSTKVYLSLIPIISGVLLATVTELSFDMWGLVSALAATLCFSLQNIFSKKVLRDSRIHHLRLLNILGCHAVFFMIPTWVLVDLSAFLVSSDLVSCTAPRTRHFLG

SEQ ID NO: 1269 - DNA, 585 bp, Homo sapiens
ttttgcagtcttctgatctttatttctgaagagctagcctttaacatatatgtttatatagtttaaatttcttactactgttagatcccaggaattcattaataatcatccttggctttccttttaaacgctattttgaaatggtcttttcactttcattcagtcatcaccccccaaaatgctctgcagcctctctgctctttgagaaagggcacaccatgcgctcggcaaccattcaaatgcaggaattaagcagcaatggctgcagtgtccttctcagttatggaggacatcgtctcattagggaacttttacagttcaaattaatttgcagaagttgccataaatgtttgcataatgacatagctttaagcactacatgattttaatctgctcacattataacaggaccaaatacacaagagcgtaatcaaatcatctgtaacttcttaattacagtttacctatttctgacatgcagcactgccatctcttccagcaccatcagggttttaatggccctctagaattaccactgagatacactatttgatccatggataaccggtatggggggaatggtcc

SEQ ID NO: 1270 - protein, 80 aa, Homo sapiens [sequence omitted]

SEQ ID NO: 1271 - DNA, 900 bp, Homo sapiens
agatctgccgacggcaggtaccttacttgggatttactataccacaggggtccgaacgcagtccgggatcaggaagaaagcaggtcgtttgcaatctaccggagcagcctgtttaccatattgtgagtaatatcatctccccctctggagacctctggagattatgaactgtttcacagacgggtgtacaccctcagtgtacagagggcgtacacccatctgtattgggagtaatatcatcctcttcctccctgaatattaagaacagtatcacaggggtgtttctactccctgcgatatcgcgtgtcatatcctcctctcccaccttgcaattagaaacaatatcagtgggggcgtgtccaccttctgtcatattgaaagtaatatcattttcttccctccaggaccgtgggaacaatatgccagggggatttccactttctgccatatatgtagtcacatcacccactctgccttggaatattattaaggaccatctaacacgagggtgtatacgtcctgcaatactacgagtaatatcaacttcttggcctctgaatatgaggaagaatatcacagggtgggtgtacacctcgtgctctattatgcggagtcatatctgtctattatggggagtaatatcactctctccctttcaggatattaataacaatttcacaggctgggtgaacacagccggcaatgctgaaattattatcaacctctccccatcttcccctcctggctcttaggacccccatcgcagggggctgaggcacccccgcgaggcggggactgagtgccagcccctcttccctagccccttcgtcagggctgagagaattttgagcgctagccgtctctcgatcgctggctaataaagaactcctgaattagaaa

SEQ ID NO: 1272 - protein, 110 aa, Homo sapiens
MPGGFPLSAIYVVTSPTLPWNIIKDHLTRGCIRPAILRVISTSWPLNMRKNITGWVYTSCSIMRSHICLLWGVISLSPFQDINNNFTGWVNTAGNAEIIINLSPSSPPGS

SEQ ID NO: 1273 - DNA, 348 bp, Homo sapiens
  misc_feature (172)..(329): Wherein any n is one of a or t or c or g
tgatcacagccccttgtgatggtgaggaaggagaaggcacagcagaggcctgggggtcaggagggctcagctgcaaccctgggtttgctgctgacttgctgtggacctggaaaccccactgcccctctctgggcctcagtttccctcacaagctcagacatcacagatgtcnaattagtttctgaacaagagagaggagaggtncaggctggggtctggccctgggtccacctggccggctctgaggttctggggactggtgggacagaaggagggctcttttggacgccagaagtttccgggggactangacttcgtggtccttgtnntggccctgggtcagcctgg

SEQ ID NO: 1274 - protein, 110 aa, Homo sapiens
  VARIANT (52): Wherein Xaa may be any one of Gln or Glu or Lys
  VARIANT (98): Wherein Xaa may be any one of Arg or Gly
  VARIANT (104): Wherein Xaa may be any one of Ala or Arg or Asn or Asp or Cys or Gly or His or Ile or Leu or Phe or Pro or Ser or Thr or Tyr or Val
MVRKEKAQQRPGGQEGSAATLGLLLTCCGPGNPTAPLWASVSLTSSDITDVXLVSEQERGEVQAGVWPWVHLAGSEVLGTGGTEGGLFWTPEVSGGLXLRGPCXGPGSAW

SEQ ID NO: 1275 - DNA, 346 bp, Homo sapiens
agatctggattaatgactgaactaaaaggaatgcaattaacccaactcagcaattatttgctttattcttcatgagtctaataacatttaatttattttaagatcaaataaaacattttgtgggtgttgggtagaatgttgataagaaagtataatagagaaataatatgttaatgaaagaggaaaggcaatagaaaacaaaactttagattccttctcctgccacccaacctcaggcttcataaaggcatgagtaccgtacatggttccccttctccttgcctggtcttaggatgaaatgtagaaggcaatcagtaaatatatttaatgcacagcttttcctagg

SEQ ID NO: 1276 - protein, 58 aa, Homo sapiens [sequence omitted]

SEQ ID NO: 1277 - DNA, 359 bp, Homo sapiens
  misc_feature (148)..(294): Wherein any n is one of a or t or c or g
agatctagtcacccttgattttatttctggagctagtgtcataatgctcatggacaagagaaagttcttttggtgatggtggtgaagacatggatgtccatttcctgggatgacaatgttggtgaagctggtggagtgggcacaagtnttagagaactatgtccagtggtggtggtcatggtgttcttactacactgcgtctgtggtatatntgggctgtggctcaagcagcgtggcttccctctgttctgagaaggggctgtggtctgtnnacctacctgttaagttttgannatttccttttctcctgaatatcttttggttgcacgttaagaagattgactgatatatgtaaactg

SEQ ID NO: 1278 - protein, 60 aa, Homo sapiens
  VARIANT (35): Wherein Xaa may be any one of Leu or Met or Val
  VARIANT (55): Wherein Xaa may be any one of Asn or Asp or His or Tyr
MTMLVKLVEWAQVLENYVQWWWSWCSYYTASVVYXGCGSSSVASLCSEKGLWSVXLPVKF

SEQ ID NO: 1279 - DNA, 292 bp, Homo sapiens
  misc_feature (1)..(292): Wherein any n is one of a or t or c or g
ncagcaaccacagcatgtacattcttctcatcatctgcacatggtacatgctctaaaatccactacatgcttggccataaagcaactgtcaataaatttaaaaaancagaaatnttaccaaggttgtttttggagcacagtagcctagaaatacaaatcaataccaagaggaactctcnaaaccatacaacgacagggaagctaagctacttgtttttgaataacatntgggaaaacaacacaattcagggcaaaatccaaattatttgtatctttagactggaattggatn

SEQ ID NO: 1280 - protein, 97 aa, Homo sapiens
  VARIANT (1): Wherein Xaa may be any one of Ala or Pro or Ser or Thr
  VARIANT (36): Wherein Xaa may be any one of Ala or Pro or Ser or Thr
  VARIANT (38): Wherein Xaa may be any one of Ile or Met
  VARIANT (60): Wherein Xaa may be any one of Arg or Gln or Leu or Pro
  VARIANT (76): Wherein Xaa may be any one of Ile or Met
XATTACTFFSSSAHGTCSKIHYMLGHKATVNKFKKXEXLPRLFLEHSSLEIQINTKRNSXNHTTTGKLSYLFLNNXWENNTIQGKIQIICIFRLELD

SEQ ID NO: 1281 - DNA, 289 bp, Homo sapiens
  misc_feature (16)..(235): Wherein any n is one of a or t or c or g
tgatcagtccagcagnttcagccaggctcaccgctaacttactgtcttcactggtcaccatcacattctcctctagagcgtggaactgcaacacctccatctcttgcggggagtacagctcttgctggatactaatggccacacactgctgcaggctctgccggggcccttcctcaagccacagcaacccagggccaggctgttgcaccaccacctgcaccccttcttgctgctntatgctcagcaagctcatatcctgcaactccacagcttcagaagtgaagtgcac

SEQ ID NO: 1282 - protein, 84 aa, Homo sapiens
  VARIANT (7): Wherein Xaa may be any one of Ile or Leu or Phe or Val
  VARIANT (80): Wherein Xaa may be any one of Ile or Leu or Val
MSLLSIXQQEGVQVVVQQPGPGLLWLEEGPRQSLQQCVAISIQQELYSPQEMEVLQFHALEENVMVTSEDSKLAVSLAEXAGLI

SEQ ID NO: 1283 - DNA, 368 bp, Homo sapiens
tggccaagcttcctgaaccagaccccatcgggtgaagtggtggaagtcggagacagtgacgatgagcaggaggtggcctcccatcatgcccacacaaacccccccattgaacattaaccccccatttccaattgacgactgctgctggcacatggagcccctctcgccaattcccattgaccactggaacctggagcggaccggccccctgagcaccagcagccccagccgcaggattaacgaggccgccgacagccgtgactgtcgctccccgggactcctggacaccacccccatccgaggaagctgcactacccagaggaaattgcaagagaagtccctcggcgcgggctcccctgggaatatca

SEQ ID NO: 1284 - protein, 102 aa, Homo sapiens
MSRRWPPIMPTQTPPLNINPPFPIDDCCWHMEPLSPIPIDHWNLERTGPLSTSSPSRRINEAADSRDCRSPGLLDTTPIRGSCTTQRKLQEKSLGAGSPGNI

SEQ ID NO: 1285 - DNA, 449 bp, Homo sapiens
  misc_feature (1)..(449): Wherein any n is one of a or t or c or g
nctcagatctccaggacaaggatgacaaggccagctgggcagtgtcccaggcccttctcctcaggctttaggcttccccaggagacctccggcaccattcagccttgttgcattgtggcacttggaaacaaagacagcggtcttctttgcttgactgtcaatagaatattgggagagcacaggtctccctgggaccctgcctcgccgctgatggcctgcagccctagacaaattcctcaacctctctgagcctcagtttccccacgtgcaaaatgaggttcttggaaggctgaacaaaatcccacatgtagatgtccaggctgtattgctggagacgccttccatgaattactacgcagataccaccacccatacagagctgtgctgtgctcctccacatcacactgcaaaggaagaaggcagaataacaagaatctcaacagctatgn

SEQ ID NO: 1286 - protein, 75 aa, Homo sapiens
MTRPAGQCPRPFSSGFRLPQETSGTIQPCCIVALGNKDSGLLCLTVNRILGEHRSPWDPASPLMACSPRQIPQPL

SEQ ID NO: 1287 - DNA, 302 bp, Homo sapiens
  misc_feature (302): Wherein n is one of a or t or c or g
ccatggtcagacggcagctaaaaataaacatctcaaaagcttcatttcttacagattttccaggagccccagtgactcatcacaagcagcctttaccgagctgcttttcttccaaccttgcggattacgagaggtgctggcctcagtggctgctggctgctggctgccagttccttggtgctgggagcccctagtctcagagggggtttcactgcaacccaagacgactgctggttcagctcctgctggtccaacaagcctgtatgaggaatgcttccccctttttccatctcctccaaccn

SEQ ID NO: 1288 - protein, 65 aa, Homo sapiens
MEKGGSIPHTGLLDQQELNQQSSWVAVKPPLRLGAPSTKELAASSQQPLRPAPLVIRKVGRKAAR

SEQ ID NO: 1289 - DNA, 365 bp, Homo sapiens
agatctcccaacccagtgtcagactgatcgcctttggcccgagggcgaggagccacaggacagtatggccaaagcggcggcctcctcgtcgctggaggacttggacctgagcggagaggaggtccagcggctcacctccgccttccaggacccggagttccggcgaatgttctcccagtacgccgaggagctcaccgacccggagaaccggcggcgctacgaggcggagatcaccgcgctagagcgtgaccgcggggtggaagtgcggttcgtgcacccggagcccggccatgtgctgcgcaccagcctgggcggggcgcggcgctgctttgtgaatgtctgcagcaacgcgttggtgggcgcgc

SEQ ID NO: 1290 - protein, 100 aa, Homo sapiens
MAKAAASSSLEDLDLSGEEVQRLTSAFQDPEFRRMFSQYAEELTDPENRRRYEAEITALERDRGVEVRFVHPEPGHVLRTSLGGARRCFVNVCSNALVGA

SEQ ID NO: 1291 - DNA, 455 bp, Homo sapiens
gcgcgcaactgttaaatttaacgaactatggttaagaaatgaatgaatagttatgagcttcacaaatcaaattctcaaatatacactttgctttccttgaattctaaatgtgtttacaacaggcacaactccactcctcattgacttgtcacgctcaattttacgaggacaagcaaacaaccatccgtactctcagtctgccaattacagctgtggccttgctgggcccagggtgtattggaaatataactgctggggagaaaaccactctctaggacatatgcttatcatttgtggccataaagagccacatggcctccagcacaaagtgatttcagctatatttgagtcactgaaaagtagaatcaatatcttaccttctggaagtctgtgggaattaccttgtcttcctttctgtcagatgtaaaatgatttcaatctagaattaaggatcc

SEQ ID NO: 1292 - protein, 55 aa, Homo sapiens [sequence omitted]

SEQ ID NO: 1293 - DNA, 440 bp, Homo sapiens
tcgcgagcaagcgagggctgtgaggactgccggcacgctgtcacttctcaatatggggaagaagtttttggttgagacatcctccacctttctctgtccaccacagctgggacagagccctcccatgtgctctgcagatgcccttcggaaaagctgcctcttctatgcggtgcttctgggcagctggggagcaggcgtggggacaagtgctgggaggtagggcagggcggggagaactggatgttccatcctcacaacgaaacacatcccacatctcctcccagaggcaaagagacatcaaaagaggaccaaattctgaggctgggtataggatggtggggtggggactagagagagacttttaaggcttttaatccttaaagactagttatagatatgtagtatatgaaagctgttggaaaatggtaaagtgctgtaca

SEQ ID NO: 1294 - protein, 85 aa, Homo sapiens
MSLCLWEEMWDVFRCEDGTSSSPRPALPPSTCPHACSPAAQKHRIEEAAFPKGICRAHGRALSQLWWTEKGGGCLNQKLLPHIEK

SEQ ID NO: 1295 - DNA, 468 bp, Homo sapiens
ctcgagtttctgttccgacaattctatagactcgactcaatgaaggcactcagaatttctaccacctgttgtattttccaacaaagattccaaccacagcggcgagagggagttatgtatcacaagctgtgattagagacacaatgagatttatacaaggaaaaactgattaagaatcacaagattccaaagcccaaaggaagtcctatttgttaccattaaataatgaaaaaggggaattgacttttgacttgtcagcaaaaacgaaattaaaagaaaagcaaaaggagttggaagggggaggcgggattccaagatacaaagcataaataaaaagaagttctgtgctccacccctccaccagagctggatacagcccttctgttgtccgccctacaaactttaggaaacttcatcaaaaggcgcacctcttctggttttcccaagaaccccaaaacacgcgggttg

SEQ ID NO: 1296 - protein, 58 aa, Homo sapiens
MLCILESRLPLPTPFAFLLISFLLTSQKSIPLFHYLMVTNRTSFGLWNLVILNQFFLV

SEQ ID NO: 1297 - DNA, 1289 bp, Homo sapiens
  misc_feature (241): Wherein n is one of a or t or c or g
gtgacccaggcacatggtgcaaacctaggacctccacctcccagctctgtagccaggggcagctcactccaccctggtccctggagtgtgcttacaggcttccgtgttggggggctgcgaggcctgggcagcaaaccgccttgtactgcctctggcctgtggatagtagatgctcaataaacctctccttcctgtcagaaactcagtctccctatgtggatgacagcattttcctaaaggntctaaagttccatccaccttaaactctgcctgaagggaagactatgaaactagaaaagaaaatggtgtggatttgtgtgctactgcagacactgctgcgacatatattaaggagcatggaacggaaccgcgtggatgataaagtctgcgtggtgtttacaaaggaatattcataagcactttctgagaagccccgtgcagctgctagcagtgactgcctaggggaaaatggacttgaaggagtagaggccaacttttcattttatacctttctatactttttaggactaccacctatgtacgtgcattttatttttgttaaatgttcgcaggggatatctggcaggacaaggaactggctggaaaggggcgcgaggagatcttctgggtgacggagatccaggtggtggttactcagatgtattttctccttcaatgagaagtttatttcgaaaacgtcctgtgtctcttccaaagatagctccagctgggcaaagtggcagctctgtgggctccaacggaagaggccaaaaggcccatcctcctcctgtcccctgggttcaattcacagccctgcctgtctctagctgtgtgatcctggacgtgcctctctgcttcctcagctcctgcttcaagacaggcctaaccaaattttgagaagtccccagcagagctcccgaccctagtagatcagagaagaagaatgaatgttctgagtgggtaccacatggcaggtgctattctaaatactgaacagctgtgaacccatttaatccccgtaagaaactggtgagcttggtttcatttgactcaagaggcccagagacgaaagcaactggtccagggtcacacagccagcaggaagtggatcagggttggaacctgggcagtctggccctgaagcgctgcagaaagtattattttgggagcaaataggtaataggtggtgagagccacctaaaaatacccctcctctctggcccagtaaccacttctagaaatctgccctaaacaagtaactcaaataaagcgaaagctgagatacaaaa

SEQ ID NO: 1298 - protein, 73 aa, Homo sapiens
MRSLFRKRPVSLPKIAPAGQSGSSVGSNGRGQKAHPPPVPWVQFTALPVSSCVILDVPLCFLSSCFKTGLTKF

SEQ ID NO: 1299 - DNA, 1714 bp, Homo sapiens
  misc_feature (515): Wherein any n is one of a or t or c or g
gcggccgcggccatggtcttcggaggggtggtgccctacgtcccgcagtatcgggacattcgcaggacgcagaacgccgacggcttctccacctacgtgtgcctggtgctgctggtggccaacattttgcggatactcttctgtccttactaccattttgcaaaaccagcattcagcagatcacactctgtggaatgccaacattcaggatttggcaggtttggaaggcgctttgagtccccgctgctgtggcagagcgccatcatgatcctgaccatgctgctgatgctgaagctgtgcaccgaggtccgtgtggccaacgagctcaacgccaggcgccgctcctttacagcatcaagatggtgctcatgtggaccagtggtgacgccttcaagacggcctacttcctgctgaagggtgcccctctgcagttctccgtgtgcggcctgctgcaggtgctggtggacctggccatcctggggcaggcctacgccttcgcccgccacccccagaangccgcgccccacgccgtgcaccccactggcaccaaggccctctgacagtggggaggacgaggatgtgggaccgccagccgtgggcactggtgggccctgacctccccgcggggagggtgggtgctgtggcccctgcaggtgtggcagagatggggcatgggcattggggtctccatcagcctctgtggggtgtctcagggtgggcagtgggggtggggctgggacgctgtttgtgctcagcggggacagccagggttgatctggccccgagggttttggatgtttttaggatgacataaaaagcaagtgttttccccatttcctcttatgaaacaccgtctgagcccaaggtacacattgggcggcctgcaggaacctgctccaggtggacacacgggccagcagccgcgaaccttgaagctggggtgaccgcaggagaccctgtaaggcctgtgagcggagccctcgaccccgtgacaccctggccagacaccctgcttggactggggtggcctctgctacccaggggtctggcacgggggagggctggggctttctctgcctggtacacacggaaaggcggctgtgcggacgcagggtcaccgtgctccgggttttctgacagtcggtgtttcctgggcctttggagtggctgcgaggcctgaacgccttgtggatccgctgtgtccagcccggctgagcatcgccagggctagctcatgctgctcttgtcagcctctggttctcctcgagtccttggggatgtggcagatgccagcgaccatcagacaacgtggaggccctcatgggcaatggctgagggggccgggctgaggctgtgcacatgcagtctgcacgccactcttgggctctgctggcggagatccccttccttctgggtgcagactgcactccggatgcagttttgatgtccatcttccagtggaggggccgcttcccgcaggcatctgagctctgtgccggggccgtggccatgggaagatgttccacgctgcctcctcctcgagttttcctcggaaacactcttgaatgtctgagtgagggtcctgcttagctctttggcctgtgagatgctttgaaaatttttatttttttaagatgaagcaagatgtctgtagcggtaattgcctcacattaaactgtcgccgactgcaggcgcagtgactgctgaatgtaaa

SEQ ID NO: 1300 - protein, 137 aa, Homo sapiens
AAAAMVFGGVVPYVPQYRDIRRTQNADGFSTYVCLVLLVANILRILFCPYYHFAKPAFSRSHSVECQHSGFGRFGRRFESPLLWQSAIMILTMLLMLKLCTEVRVANELNARRRSFTASRWCSCGPVVTPSRRPTSC

SEQ ID NO: 1301 - DNA, 536 bp, Homo sapiens
tttttttttttcatctgatgtgtatttaccaaaataaaaagcaaaaccccatgcttgtcatcaggggagaggaggtgagggtggaggcacagcgcacctccccagctgtaggacagggggagggcgtggtactggccgtttctccatttgctgatcaccgtgagagagcctgatggggtcaggcggcacagtctttttaccactgaacagccacttcctgctgccatggccatggagctgggccttccacccccacctggagcctactgaggcccaaggagaaggcacaggaccccacggcaggcaggatgtatttccgcttgtccaggcaactaagccacgtccccacgaatggaggctcctacagagacaggcgggtcgggtggtccagtaggaccagcaagcgcttccccaaacccactggctcctcctcctgggcgcgaggctccctgtgtggccagctgccctggtgtggccatgtgaccgagttctgggagatggcgggtgggcactgacccgtaaccccctctgtgcgg

SEQ ID NO: 1302 - protein, 77 aa, Homo sapiens
MAMAAGSGCSVVKRLCRLTPSGSLTVISKWRNGQYHALPLSYSWGGALCLHPHLLSPDDKHGVLLFILVNTHQMKKK

SEQ ID NO: 1303 - DNA, 527 bp, Homo sapiens
gaatataaaaacaaagtatcttgggtttcaaaaatcaactaaaaaggtgatttttatgttttccttagttaattcctattttctttttctgtggcagtctctttccatagaatttaattgtttcatatacagacttaagactcgacacaaactttgcaatctcatcagaaacatcatgggctgattttaatagcattgttctggtaccacaaatatgtatcatgtagcttttccgtatgtaatactgtccaaaatcatccaatctcttcattaaattatgaaatattcaatgagatgcttcaaaaacataccaggatttcttcataaaattaatgactggcttcaaaaagtttgcactctctggaggagacaacatggacaaatacagaaacaagataaataattggacaactgaaagcagccaagcacagatgcacagaaagcactgagtgttggctgaatgatggcaaaacgcacaaattgaaactagacttgaaagcctcagtgtgcgagccccctcactggat

SEQ ID NO: 1304 - protein, 68 aa, Homo sapiens [sequence omitted]

SEQ ID NO: 1305 - DNA, 556 bp, Homo sapiens
  misc_feature (1)..(2): Wherein any n is one of a or t or c or g
nntctccaaagaagcaccaagggagcatctggaccaccaggctgcacaccaacccttccccagaccgcgattccgacaagagacggggcaccttcattgcaaagagatttccccagatcctttctccttgatctaccaaactttccagatctttccaaagctgatatcaatgggcagaatccaaatatccaggtcaccatagaggtggtcgacggtcctgactctgaagcagataaagatcagcatccggagaataagcccagctggtcagtcccatcccccgactggcgggcctggtggcagaggtccctgtccttggccagggcaaacagcggggaccaggactacaagtacgacagtacctcagacgacagcaacttcctcaacccccccagggggtgggaccatacagccccaggccaccggacttttgaaaccaaagatcagccagaatatgattccacagatggcgagggtgactggagtctctggtctgtctgcagcgtcacctgcgggaacggcaaccagaaacggacccggtcttgtggctacgcgt

SEQ ID NO: 1306 - protein, 185 aa, Homo sapiens
  VARIANT (1): Wherein Xaa may be any one of Ala or Arg or Asn or Asp or Cys or Gly or His or Ile or Leu or Phe or Pro or Ser or Thr or Tyr or Val
XLQRSTKGASGPPGCTPTLPQTAIPTRDGAPSLQRDFPRSFLLDLPNFPDLSKADINGQNPNIQVTIEVVDGPDSEADKDQHPENKPSWSVPSPDWRAWWQRSLSLARANSGDQDYKYDSTSDDSNFLNPPRGWDHTAPGHRTFETKDQPEYDSTDGEGDWSLWSVCSVTCGNGNQKRTRSCGYA

SEQ ID NO: 1307 - DNA, 948 bp, Homo sapiens
tttgttttttttttaagatggagtctcaatctgtcgctcaggttggagtgcagtccttccactggaggggctttcttcctatttctccaataggtctaaaatgtcaggttacagtcagatttggcaatgtgtattacttcaaatgattgagctggaggaaactacattcctttggaatgatgacagaatctatcagaaacttcacacatccactcagctctcctggatccctgtccacaccatgaagcctgaagttgttatgatggcctttatgaacctgaaagaagccgctggcttccaccacaccacagtgtcacccaagaaatccaatccttgtaagaaaggatagggcttatcttctcatgacttagaatttttcagaaatgagaatattcacaaaagagggaaaggcaattcccttacctatgcgctaaggaagccaaagtcagtgtgtgcaagagctagctctcaaaggcaatgaaaggagagtaaagaatagttttagttatcccctatccacttctcattctgactccccactttgctttcttttgcaaaaaggatgagctagttttccatttttataaaaactggcgatagtatgaataaacccagcatctataaagtagttgaataaaatctcaggccaaataaaggcctccataaggaagaactgacattaggactccaattactgcctgaagttctgctgtcaaaatccagctgcatgatgatgccactgtactccagcctgtatgacagagcaagactgcctaggaaaaaaaaaaaattccagcggcaccaagtaccaccttgatgacttctgtattcaccactaaaaactgaaatagaacatactatatacagcttcaagtttgtcactttttaataaaacttttcccacaaatgattataattacttgccctttgaagctattggatagatct

SEQ ID NO: 1308 - protein, 82 aa, Homo sapiens [sequence omitted]

SEQ ID NO: 1309 - DNA, 1753 bp, Homo sapiens
tttactttttaaaattttattgatgtaccacctgatcaaagcatgggatattttaatagtattatacataatatttttacatagaaaactttacatagcatttcatattatataattctgcttattctttcaaaaatttatacatccattgggcaaggaatggttttcattaaattaccaatattaaatgcacttaatcattgtgtataggttaaaccaaagtaactattaactaacttttaggcattttaaggaggtaaaacatacattttacacataaatatttgatgcaaatatgcagataaaattttttaaaaattagaacactgagtaaaacacctttgatagattatattgttttgttttgagagcaaggatttccagatatgttcattctttaaaacactcagctttggtttctttgtttcccaaactgcaaagctgctgataacaaaactccaggattccatgtgagttcagctatgtctactttaacacaaatattaaaacagaattcagaaaatgcagtattaaggatccagcttctattgaaaccaatatccatttgcatcataacaacaaacatttgaatgagatggtcacacttgtacttatcagcaggttcctttaataacaaagactactaaatgtatatccttaatcacaaaagaacaacaaaaaaaatacaggttttttttttttcatttcgtacaaaagtcacctgccagaggaaaatgttgtgtttccagatattataatacaattttcataatgtatgttctttggttgtacatgaggagtacagggaaaagatatatttgactctaaagatgcgtatcagaaataaaaattacccatccactgtttgttgttaagatgccaaagctggtgatttccctaacagacaatgaagagaaacaaaattgctcaaagcagcagtattgtaacaaataaaaacttctctagagacccagcacatataatcaacacttaaagcattctgaaaaagaaataaggccttggaaaatgtttcactctcctccattacttggttaaataaatggtgtcctggcctgatgttgcggttgtacataccctttcactagtgtttgagtggcacaagccacatttaccatgagaaagaagagatttattcataaaaatgaatttaggctgaatggcttattattggaggtaagggatttcaaatctctgttcgtcactgtccactgacaagaaaaatcaccctgaatggttttacatccaattttttaaaagtccattgctggtacaattcaaatgcctcattcagaaaattaaatcttttaaaatactaaactaataagaaatgtaagcctgaatgtttcagcaagtaataaaatgcactgacacatctgctacccctcaagaggcaaaattaaagagagggcagaagacaccagaaaaattttagtcacatccgatgaagaaaatgacatgagaacctcagaaggaaaggaaaaataaccaatcagggatatagctgcacgcaagatggacttaatgaatgaacacgtgttccccatgtataccttttgtacaaatatcaatggagacgactgacttgttgaggtgatgacgcgctatgataccagggagtgtaggtttcatggtgcagtgtaaaggtgcagtggattccagggcaaaccagtcaaatgtgctaacatttgcgactcacagtaaagtattctcccatagtcctttcctgctaaat

SEQ ID NO: 1310 - protein, 73 aa, Homo sapiens [sequence omitted]

SEQ ID NO: 1311 - DNA, 907 bp, Homo sapiens
tctagagaaaaggccatacatattttgatttctctattaactgatgtgattacttcaattaaagtaatgtttataaaccacagtcattctttatatctaagttcccttgacccttttatacttataatttctaaggcagataaaagagataacaaaatcttttatggaagtaaaggtctttcagtttattgcttaagaaacaacagattaaagaaaacttttagttttagtctctgatgttacagattcagatgattcctataggttatttaaagaattcattttatcattttataagcaccctaaatttataaagctaaccacaaaagttgcctgtacattttttctatacctagtttcttgcaaattctacaatctgacttaagggataattaacggggaatacagtgtattactagacatgaaagtagtcctatccttagaaagctgtagttgaatataccaaaataagtcagttgaagaaatctgtgattctagtagtaataccatatcacttaggaccatcaaaaaaatgtgtacctttctccaaacgacaactgatgcctttctttatgtaagcttttcacgtgttttggcacatattccattgcatttcaataaaaatgttaatgcattatcagtaaataaaagaattctatataaaactattctcagtttcataattgcttcctatatatttccttggaaaatagtgaaattacatatgacaaggcaaccagccaaatttaaagagattttgtagataaaattcatttatgaccattaagttttggctggggggccaaaacatcaaagtctcgcttgtgatctttaaaatgcactcttaattcattttgagttaattaaaattccatttgcaaaacactattttaatcgctgacctagg

SEQ ID NO: 1312 - protein, 76 aa, Homo sapiens [sequence omitted]

SEQ ID NO: 1313 - DNA, 535 bp, Homo sapiens
ataaatattagctacttttatttcattggcagtaaaaacagttgattgagtttccacctcaatcaacaacgtagtagtgaattaaatgagaattcagtacaatgcgtattttttaaaaattgtgaagaccttgtatgcatttatgacttttttgggcagagtcaagctgcgatgctaagggtgtggttaaactgtaatatgaaggaaaaaattcaaacagggagcataaaccacccaccagggagctatttcttttgtaatgtgcattccatttcttctccctcatgctttttaattccttccatatttcctgccataattatcaaatgtttagtttctgacctcactttcctggagactggagcccggggaatttagaattgtttattttctgtccataaacctttgagttaatggagcggcttctgagcaaagagtttgttggtttgtttgtagtgtctcaggaaggtcgttagagttgaaaaaattggtacaaaaaaaacaagcgctgaaatgctttaactggaaactcgag

SEQ ID NO: 1314 - protein, 68 aa, Homo sapiens [sequence omitted]

SEQ ID NO: 1315 - DNA, 936 bp, Homo sapiens
  misc_feature (1): Wherein n is one of a or t or c or g
ntgccgtgcgctgagtgtccgcgtcgccctcgccgcagtcgcgggcaccccgctcggcgtcggtgcctgagggaggccgcgatggcggccgaggccctggcggcggaggccgtggcgtcgcgcctggagcggcaggaggaggacatccgctggctgtggtcggaggtcgagcgcctgagggacgagcagctgaactcgccctacagctgccaggcggaggggccgtgcctcacgcgggaggtggcgcagctccgggccgagaactgcgacctgcgccaccgcctgtgcagcctgcggctgtgcctcgccgaggagcggagccgccaggccacgctggagagcgcggagctagaggcggcgcaggaggccggcgcacagcctcctcctagtcaaagccaagacaaggacatgaaaaagaagaaaatgaaggaaagcgaggctgacagcgaggtgaagcatcaaccaattttcataaaagaaagattgaagctttttgaaatactgaagaaagaccatcagctcttacttgccatttatggaaaaaagggggatacaagcaacatcatcacagtaagagtggctgatgggcaaacagtgcaagcggaagtctggaaaacaacgccttaccaagtggctgctgaaattagtcaggaactggctgaaagcacggtaatagccaaagtcaatggtgaactgtgggacctggaccgcccattggaaggggactcttctctagagctgcttacatttgataatgaggaagctcaagctgtgagtattttaaaaccagacagccaaactttgggtagttatgttgtaaactacattatataagaggccacatattgaattcacgaatgttgagttttttgggggtttctaagatttaaaatttgattattgatgtttaataaatatttgcctcatgaatgttaa

SEQ ID NO: 1316 - protein, 277 aa, Homo sapiens
  VARIANT (1): Wherein Xaa may be any one of Leu or Met or Val
XPCAECPRRPRRSRGHPARRRCLREAAMAAEALAAEAVASRLERQEEDIRWLWSEVERLRDEQLNSPYSCQAEGPCLTREVAQLRAENCDLRHRLCSLRLCLAEERSRQATLESAELEAAQEAGAQPPPSQSQDKDMKKKKMKESEADSEVKHQPIFIKERLKLFEILKKDHQLLLAIYGKKGDTSNIITVRVADGQTVQAEVWKTTPYQVAAEISQELAESTVIAKVNGELWDLDRPLEGDSSLELLTFDNEEAQAVSILKPDSQTLGSYVVNYII

SEQ ID NO: 1317 - DNA, 436 bp, Homo sapiens
ctcgaggactgcctagcacaagggtatcccctgtggtcgcagactccaagtccaccctaggttccagaccggcccagaactagattggctcacaccaatccaggattcaggcccaccccatttccaggttggcagccctagccctaggccttagtcaggtatctggcaagcatctgcagacccaggctccaggcctcccgaggcctaagccagtttctgccaccccactctccaggccagttcctatggtcccatcctccagcagacccagggtccaggcccatcacagttgactccagtattgggcaggtgcctacagacccagtatctagtactgcctctgtggacttaggttccagtccagttcctacagccctaggacccaagccaccctttgtggccctagtgtccatgcccacttctgaatatgttggtt

SEQ ID NO: 1318 - protein, 89 aa, Homo sapiens
MDTRATKGGLGPRAVGTGLEPKSTEAVLDTGSVGTCPILESTVMGLDPGSAGGWDHRNWPGEWGGRNWLRPREAWSLGLQMLARYLTKA

SEQ ID NO: 1319 - DNA, 1295 bp, Homo sapiens
  misc_feature (1)..(758): Wherein any n is one of a or t or c or g
nnttttttttttttttttttttttttttgaaaacttcacagttactttaatctgcacgggttccggggaactcctctgcccctccccgctccccttcaccagcctcccaccgacctggcgtccccaactcagcccaaggagctgtcagggattggaggcggctgggtcctccggcagaacactaagacgggcccccggggcggcccggctctgcccggggccgaggcagcgacagcagatgcccgaccccgaggagcccactcccagtgcgggnnctgagggtcagcagccccgggaggtggccccgagccccggcggtcgcagggcggggcctccgccagtcccgggnnagtcctctgcggcgcagggctgggctccagggcagcgggaagaggcnnaggccggagaggcgggcctgggcaggcagcagctcccgccgcggcgcggggagcaaggtccggaggggccggcgacgctgccagcgcccgcggaggcactacgggcggtacatggcaaaggccaggagactgaggagcagggtgaagccggccaggcccagagtggcggtcaggggaaagaagggccggtactggatctggcagtaccagagcagcagcaacagcaggagcagcaggggcagcagcaggctgccgatttccagccggaggggccgggctcggaccccggcgggcaggggggatttgggggaccgactctcgtggacacgtggcagtggagaacgcanngttgggagggnnaggtgaaggctgcccagggtctgggtgtcgtcgcctagcagctgcccttggtagatgagtcgcacctgctgttcccggccgggaaactgggtccttttcaaggagccaatggtgtcgtggggccaggccctggccacctgctctgaatcattgaggaatttcagccgtagcacgatggggctcctgcggggagtccggggctggcggtgttgctgtgaaccccgtgctgggctctggctgtgcagcttgacctctgtgtctcaggctgggggtctctcgccctggggcctcccctctcatgctgtcggtagctgccatgctgcgctgggctgggatggcgttggggtcctgacggctggggcagtgggtcccgccctcagcggtgtgcgttgagacccaggcaagggccagcaccagaaggcaggcaagcaccgagaaaaggacggtcacctcatcacccaccccttcaatcagggtcatggcgcctgccttgcacgccgcgctaccgagcgcccggctcccccagctccaacatca

SEQ ID NO: 1320 - protein, 90 aa, Homo sapiens
  VARIANT (68): Wherein Xaa may be any one of Ala or Arg or Gln or Glu or Gly or Leu or Lys or Met or Pro or Ser or Thr or Trp or Val
  VARIANT (72): Wherein Xaa may be any one of Ala or Arg or Gln or Glu or Gly or Ile or Leu or Lys or Pro or Ser or Thr or Val
SRPGPEWRSGERRAGTGSGSTRAAATAGAAGAAAGCRFPAGGAGLGPRRAGGIWGTDSRGHVAVENAXLGGXGEGCPGSGCRRLAAALGR

SEQ ID NO: 1321 - DNA, 388 bp, Homo sapiens
gaattcacaccacgccagcatgtgttcactgggggcttcctgtctgcaggccacggagctgggtccagtgaagggctcagattccgggggggtggcaacgcttctgctgggacaaagcctctagtccaccggggatgcctgagatggatggtctgggtttcttcccatttcctagaactgcttacccgtgtggagccatgcttactaacccgctgcccttgatgccagtgaggcttggtgctgggctgccaatgacctcagttatggggcacggcaaacttggtgactttagctgcaggcagagtctggggtggcggtgcctgcagtctggtgtgctgtaatgtaaacacccaggaaggcttctggttgttgctttaggcctgctgtc

SEQ ID NO: 1322 - protein, 68 aa, Homo sapiens
MPEMDGLGFFPFPRTAYPCGAMLTNPLPLMPVRLGAGLPMTSVMGHGKLGDFSCRQSLGWRCLQSGVL

SEQ ID NO: 1323 - DNA, 964 bp, Homo sapiens
atttaaaggtatatattttaaacgtgtgtcgtctacctaagtaagataatagtctttgaactaggtactatgtttgctgtttgggtgatgggttcactagaagcctaaaccccagcattactcaatatatccatctatcaaacctacgtgtgtacccccctagatctataataaaagtaaattaaaataaattaaataccagtcaactatttggttgactttggttgtactgattaactggaaatgtgcctctgaagccacacagccagagcaactggctttttgtcatttctaatgaaaagccttgaaagatggttctattagataacgggccacactgaagctaactgtgcatctagatcacatcaaagcagtagaggtgagatgttagcacagctttggtttctgcagttctcacctcatgcttgtaagatgtttagctgtgtcaactttttgaattaatgtgggttcttagccttcatagaccctgtgtttcagccttattaggttttgtattttgagatcccaaattgtgaagctctaaaataaaacaaatctgtgtgtttaggtactagttccacaggtggtcttgccacagaagaacctttccatgaaagtcgaatacgaatacacagggctctctattgctgctatcaaaatggactaattccttttagcttacattttttacatcatgttaaggaatttgacgttttggatgttcagctggttggtagttttcatttcaatcttgattttctgcagacttaaatagttttgacaggtgaagctctgaggattaaatattgattttagccctctccaggtcaaatgtgccatatttgacaacttatacgaaaaacagcatccttcccctcaactatacactttaaaatggatgttattttggggatgaggataatatgcagcaaaaaattataggaattttactcgtgccgaattc

SEQ ID NO: 1324 - protein, 50 aa, Homo sapiens
MAHLTWRGLKSIFNPQSFTCQNYLSLQKIKIEMKTTNQLNIQNVKFLNMM

SEQ ID NO: 1325 - DNA, 748 bp, Homo sapiens
ttttttttaacttttattagtctttttattcttcttttattgatcacctctgaagttcagtagcacactgcataattttttgcattagcatgctgttgtttctacctaaaatgaccggggtccttgccttctgcttcccatagagattgtcccaactccataggtccatagtcacaaatgaggacagctttacatgtaacatgaatcttaaagcacagctccagaaacaagctcacctcctcagtatcacacactgccaggaaacttgggggcaaccaggtcccctgcatttcatcactgtcattaccccggaagtcctcgatcaccagaaaaatcaccttctgtcatcttaagagtcttcatctgcttaagtacgccgggatctctgtagactaagtcagtcatcctgtaggccccactgcccacgctgtgccaatagctggtgtgctttttctcagtcttgatgggaccgttttatccgcctgtcagcccagagcgcagcgttgcgcagtccgaagcgagagaagggcgcggcccccgcgggctcccgcccctctcactgccgagggggcctttcggagctcgggcccaccgggttggaaggcccggctcctccgtgccacattcaccaccatctcgaggccgtgggaggaaaaacccggcgagtgcgcgccagcagcagcgactagcggggaacggcgcgcaggaaggcaggcagaggcttgcagctagtaagtcgacaccgggc

SEQ ID NO: 1326 - protein, 95 aa, Homo sapiens
MGPFYPPVSPERSVAQSEAREGRGPRGLPPLSLPRGPFGARAHRVGRPGSSVPHSPPSRGRGRKNPASARQQQRLAGNGAQEGRQRLAASKSTPG

SEQ ID NO: 1327 - DNA, 588 bp, Homo sapiens
cttagtttttcaaaacacatgttcattttaccacaaagtgcccatttttatatacatttaaggattattttttcaatgtcaagttcatgttagtgatttcagaaatatagtcaaaatatatagtcaaatatatcttgacaggcatcttgagatttggtttttcattttactatatttatgactgaaaatggttttgtgttttctttatgttgtttatatattttttaccttagtgtttacactggtaaggcttgttagtccatttttgtagtttttttaaagtaagcttttagatctatttgtgttttaatgtttcccagtttgggttttgttttgttttggaagaatctgctttcattattaaattataaaatgtaaatgctctaaagtaggaatttttaaagagtaaattatttgtgtagcttattaggaggttcaggttagtgaccataaagtgggttacttgtacatgaaaatttgaaatggtaccatgtaaaattcttctattgtcaactttttctgatgtatgccagttcatttactgacaaatgttgttactaagtgcttattaagaagtgtaatacgcta

SEQ ID NO: 1328 - protein, 80 aa, Homo sapiens [sequence omitted]

SEQ ID NO: 1329 - DNA, 572 bp, Homo sapiens
ggtcttgggtgcagatcctaggcgagtccataaattacctgatttcttctcccgagtatcggcgtagaggcctttactatcctgcctgggaacacctagcctactatgcacatcagaagagggctctctccgaacgacggggttactactaaaagccttttccggagaatgtggtctttttcctaaccgctggcgtatatctgatttagtactgctgactggtggccgtggacgggagtgctgacgtttctcatctaatagatgtcggacatctgcaaatttctcaggtggtaatttgttaccaattcggtttttgatattgcttgaagatacactatctgccctcatggagttcctaatatttttcaactgagattccacttcgtcagcatacatagtcattttcatgcttttctttggtgaaggcgtggaaatcattttcagttctagatcatagtccatttcatctgagtctgagctgctggcactggatcgtctagacgcgctccgctcccggggctgcttgagagccgggagctcctcgtggtactctaccaccactctgtcatctg

SEQ ID NO: 1330 - protein, 154 aa, Homo sapiens
MDYDLELKMISTPSPKKSMKMTMYADEVESQLKNIRNSMRADSVSSSNIKNRIGNKLPPEKFADVRHLLDEKRQHSRPRPPVSSTKSDIRQRLGKRPHSPEKAFSSNPVVRREPSSDVHSRLGVPRQDSKGLYADTREKKSGNLWTRLGSAPKT

SEQ ID NO: 1331 - DNA, 557 bp, Homo sapiens
cggccgagcagcggggatgtttatacgatcttccagcaatgcgaccgaggctcccccggctttcttgcgttggtgccttggcagggctgggggcggccagctaggggccccttgcctatgaggtctgctgacccagaaactttgctacgagcttccagccaaggaccaagctgaggccgactttgggaacggcagcaccgtggtaaagaggcacagcctgtcgtctggcagggtcagccgctcagccagtctgtcttcttatccactcagccggtccttgtggatcatctcctttacggaccctgtgttagaaagaaggggaattgctttgtcgaggactgtcagagagtgccaagagcttcttgatcttagactgcgcggatgggtttttttgtacctgatgtgtacaaagttccctgccagctcttgccaagaattcaaaggagtaagaataattgatcatatagccatcattgaagcagcgccagacactgtgctaagagcttcatatgcattaccccagcgctcctgttctcgaggaactcctgtcgtctaga

SEQ ID NO: 1332 - protein, 51 aa, Homo sapiens
MCTKFPASSCQEFKGVRIIDHIAIIEAAPDTVLRASYALPQRSCSRGTPVV

SEQ ID NO: 1333 - DNA, 981 bp, Homo sapiens
  misc_feature (1)..(2): Wherein any n is one of a or t or c or g
nntgaaaattgctaggctgagaaatgctatcagtggatattaccagcaggtaccgtgcacccagtacctatcttcttaactccctgaaagaggggctggaaggcctccatggtgaatcttgctcttcttttctccctggggccctcagtggccatgaatatgcagactgcagggcttgaaatggacatctgtgatgggcatttccgccagaatggcggctgtggctatgttctgaagccagacttcctgcgtgatatccagagttctttccaccctgagaagcccatcagccctttcaaagcccagactctcttaatccaggtgatcagcggtcagcaactccccaaagtggacaagaccaaagaggggtccattgtggatccactggtgaaagtgcagatctttggcgttcgtctagacacagcacggcaggagaccaactatgtggagaacaatggttttaatccatactgggggcagacactatgtttccgggtgctggtgcctgaacttgccatgctgcgttttgtggtaatggattatgactggaaatcccgaaatgactttattggtcagtacaccctgccttggacctgcatgcaacaaggttaccgccacattcacctgctgtccaaagatggcatcagcctccgcccagcttccatctttgtgtatatctgcatccaggaaggcctggagggggatgagtcctgaggttgcaactagaaattcagaggggcttggaatagagaaacctaaagaagcatcatcccctccatccccaacttcctcaaagcccaaagccaagggaaggataaatcaaggctcaaggcttccccagcaaagattagggaaagagacttgaccccaggactgtactacgactcttaagagaacactgcacagcactcaaagtcccccactggactgcttcctccttagccccactggtataaatacatctctctccaaaaaaaaaaa

SEQ ID NO: 1334 - protein, 201 aa, Homo sapiens
MVNLALLFSLGPSVAMNMQTAGLEMDICDGHFRQNGGCGYVLKPDFLRDIQSSFHPEKPISPFKAQTLLIQVISGQQLPKVDKTKEGSIVDPLVKVQIFGVRLDTARQETNYVENNGFNPYWGQTLCFRVLVPELAMLRFVVMDYDWKSRNDFIGQYTLPWTCMQQGYRHIHLLSKDGISLRPASIFVYICIQEGLEGDES

SEQ ID NO: 1335 - DNA, 653 bp, Homo sapiens
cttgctgccatgaatcccaagttgctacaagggcgagttgggcagatgcttcccccagcaccaggcttccgtgccttctttagtgctccaccctccgctacaccacctccacagcagcaccctcctggcccaggaccccacctgcaaaacctaagatctcaggccccaatgtttagaccggacacaactcacctccatccacagcaccgtcgactcttgcatcagagacagcaacagaatagaagtcagcatcggaatctcaatggtgcgggagatagaggaagtcaccggagcagtcatcaagatcatctccgaaaggatccatatgccaatctcatgttgcagcgggaaaaggattgggtctctaaaatccagatgatgcaactgcaaagcactgatccctacctggatgatttttattaccagaattactttgaaaaactggagaaactgtcagctgctgaagaaatacaaggtgatggccctaagaaggagcgcaccaagcttatcacccctcaggtggccaaactggagcacgcctataagccagtgcaatttgagggctctttgggaaagcttaccgtttctagtgtgaataatccccaaaaaaccattgatgctgttgtgacatctcggagaaaggatgatgagac

SEQ ID NO: 1336 - protein, 217 aa, Homo sapiens
LAAMNPKLLQGRVGQMLPPAPGFRAFFSAPPSATPPPQQHPPGPGPHLQNLRSQAPMFRPDTTHLHPQHRRLLHQRQQQNRSQHRNLNGAGDRGSHRSSHQDHLRKDPYANLMLQREKDWVSKIQMMQLQSTDPYLDDFYYQNYFEKLEKLSAAEEIQGDGPKKERTKLITPQVAKLEHAYKPVQFEGSLGKLTVSSVNNPQKTIDAVVTSRRKDDE

SEQ ID NO: 1337 - DNA, 361 bp, Homo sapiens
actagtgaaggaggaaatgaatgaacaaaaaggaagatctctcttttctacagcaagcagtagtttctcacagcatccagcataggttactcaagacaaaaagaggagtttggatgaaatggcatagggctgactactggactaagaattctggattttattctgcaagctggtggagacacatcaaaggtgctggatgcagaaagtccaagatcaagatgccagtgggattggtttctgtgctacttgaaggggcaccaaaaaatcatgagcccaggacaggacagaggtggaacttattctccaggtgctctactttgaagtctaggacatcttaccatcatcctggagagctggatcc

SEQ ID NO: 1338 - protein, 113 aa, Homo sapiens
MNKKEDLSFLQQAVVSHSIQHRLLKTKRGVWMKWHRADYWTKNSGFYSASWWRHIKGAGCRKSKIKMPVGLVSVLLEGAPKNHEPRTGQRWNLFSRCSTLKSRTSYHHPGELD

SEQ ID NO: 1339 - DNA, 471 bp, Homo sapiens
ctccggaacaccaagggccgagtgcggtttatgattggccgggagcggccgggagagcagagcgaagtggcccagctaattcagcagactttggaacaggagcgatggcagcgggagatgatggagcagagatacgcccagtatggggaggatgacgaggagacgggagagtatgccactgacgaggatgaggagctgagccccacgttcccgggtggtgagatggccatcgaggtgtttgagctagcggagaacgaggatgcactgtcccctgtggacatggagcccgagaagctggtgcacaagttcaaggagctccagatcaagcatgcggtcactgaggcagagatccagcagctgaaaagaaagctgcagagcctggagcaggagaaggggcgctggcgggtggagaaggcgcagttggagcagagtgtggaggagaacaaggagcgcatggagaaactgaagggt

SEQ ID NO: 1340 - protein, 157 aa, Homo sapiens
LRNTKGRVRFMIGRERPGEQSEVAQLIQQTLEQERWQREMMEQRYAQYGEDDEETGEYATDEDEELSPTFPGGEMAIEVFELAENEDALSPVDMEPEKLVHKFKELQIKHAVTEAEIQQLKRKLQSLEQEKGRWRVEKAQLEQSVEENKERMEKLKG

SEQ ID NO: 1341 - DNA, 2041 bp, Homo sapiens
tttttttttttttttttttcattacttactcagttttatttaggtggacacaacagtgaagaactcaaacatggtttgacctttatctacagacacagcagcctggattttcagcctttcattccttttaaatgaaagtcagcaggctcaaaatgcagagcttggctaagtcacttctgtggaaatatgaaatatagtagtgataaccaccaagggctttcaaattcttgtgttcttctaaggatcctttcctaacaccatgatttgttctcatctttgtggaaatgaaaccaagatggtcttaatttgtaaagtcctttttcctctgttggcagtcttcttacaaaggatgcagcaaaaagaacacatttttctttcaaagttttgaagaaatatagtcattaaaaagaatttaaattatgcctagagcaccactttacagaataccattaaattgtaattacgtgcttttaaaaagccaacttgttaaagaggagctgatggtttcagtttttgtagggaacacttgtaacactgcagaattctacaagggctttctcctctggtgggcagggaaaaaaccactcaagtcatgagaaacttttatagctttcaggaacttgaagaacaactgctgattaaatttcatgctttagtgacgaagtatttttacagctaaaaaaggaacccagaaacataatacatttcatttaaagcaggcagaaaaaccaaccacaaattaatatctattgtattccacatggcactatataatcgttgtcaatcgttttaaatggtttcactttatttgtgaaaaataaagccaaaatgccaacaacttccaagaaggaaccatttcatcatctccatcccctcagataaaacctcaattactggtaattgtacatttccatcaatatcccttttaaagaggtttattctgaggaattactgagaccaggagctttaaaagcttcaatttccctaatcactgagaggcaatcttgaacttctattgaacttggaaagcggtcaagactcactccataataagaagttaaggactgtcactacttaaggtggaaacctattcatttgcagaaatagtcctctttctaccaagaggctaatgagcctcccctccccttcccctctctaaaataaaatcagtttgccttctaaaatcaaataacagttgccaacaaattaggatttatcctaagagtttgtccattcatttcaacaaacatttgaagaatgcctcatctgggccagtctctgttttaagcacttgcgatatagcagtgcataaaaattctcacccttacaaacctttgattgacccaggactgacagtaagcaaaacaaaccaaacacgagcacattttaaaaaggtgtctaaaaacctgcctgatagctgagctaattctcataggcacaaactgccctgacctgagctcactcttggacaagcagttcccacaaatgaaactaaacatgcaaaccagacccactgtacaggtggaagtttccagctttctcacagtacaagtttaaggtaggacgcagcattttatagtgtacgtcccttcctccccacattcctgtgaggcggaacaagaacaattacttgaccctggaggaagacgacgccttgtggtcagggagagaacagcagttcatgctggctgcctcgtctttccaggcccgctgctgcccaggcttctactgaccttgttagttaggtctgattctagaaaatgaaggcaggtactcaaaaggtacagttcacccagaagaatgtaaatgtgactgagctaagcaaacgtacagctgagtcttagtgttgggggaagtagctttcatgaaggcaaagggagccccattctcggccgtatggcttgctcttcagccgttggagtgcagctttttcagaggcgtggactaaaatgacctcctaaggtgcactgaaaatgttggctgtagatctgaggagagggtccatagctataaaaatatttgcaaggggattgtaacccct

SEQ ID NO: 1342 - protein, 71 aa, Homo sapiens
MFSFICGNCLSKSELRSGQFVPMRISSAIRQVFRHLFKMCSCLVCFAYCQSWVNQRFVRVRIFMHCYIASA

SEQ ID NO: 1343 - DNA, 1375 bp, Homo sapiens
  misc_feature (1)..(2): Wherein any n is one of a or t or c or g
nnacgcgtgacgtcccgcgtgatggctgggagggcccggcggcgacagcggaggcagagaggaaggcggttctgagagcttcagagagcgatggaaagcaaaatgggtgaattgcctttagacatcaacatccaggaacctcgctgggaccaaagtactttcctgggcagagcccggcactttttcactgttactgatcctcgaaatctgctgctgtccggggcacagctggaagcttctcggaacatcgtgcagaactacagggccggcgtggtgaccccagggatcaccgaggaccagctgtggagggccaagtatgtgtatgactccgccttccatccggacacaggggagaaggtggtcctgattggccgcatgtcagcccaggtgcccatgaacatgaccatcactggctgcatgctcacattctacaggaagaccccaaccgtggtgttttggcagtgggtgaatcagtccttcaatgccattgttaactactccaaccgcagtggtgacactcccatcactgtgaggcagctggggacagcctatgtgagtgccaccactggagctgtggccacggccctgggactcaaatccctcaccaagcacctgccccccttggtcggcagatttgtgccctttgcagcagtggcagctgccaactgcatcaacatccccctgatgaggcagagagagctgcaggtgggcatcccggtggctgatgaggcaggtcagaggcttggctactcggtgactgcagccaagcagggaatcttccaggtggtgatttcaagaatctgcatggcgattcctgccatggccatcccaccactgatcatggacactctggagaagaaagacttcctgaagcctcgcctgattctctaagacttgccagcccttctcctgacccctgcaccgcctcctccaccttcgttcattcagcaagaatgaactgggctggggtgaaggaactctgcaggggcaggaggagaggacaaaggaaggaaaccaacttcatcagtgttactccagtggcttctgacacacagaaggggactgtcatagtcatgcttgatctcatgctcattcttttaccccctagtgcctccatactgagaggtacacacgggtgaacacgcacacacagacatgaacaggacacgaaagcaaagcacaggaacaagctctggctcattcacagaatcatttattcacaaatgtattgagtgccatgcaccaggcatgttttagggctgaggagatggcactgaacacaatggttatggcccctgtcctcatgaagtttatagtctgatgcagaaaccaataaacaaggaggcacccaataaatacattcttagaaagtgta

SEQ ID NO: 1344 - protein, 266 aa, Homo sapiens [sequence omitted]

SEQ ID NO: 1345 - DNA, 574 bp, Homo sapiens
tttttttttcataatgctaatgcaaaagggcttgaagtatcaaagagtccacaggaaatggatgcccccagtaatatcttttttttaaaaaaaaatatacattatataatatatattatatatataaaaagctagtgtaaatgcttccatggtgtggtcacaaatttgaaagatgaacctcctttcagctgttaaccatcttcccatttgcaacaggttttaaaaagtcgtttttatcttcagacataacatgagttttcagaatgaggttgccagcactgacagatgtggtgatggggaggcaacttgcattgctaatagacactgggagtggctggctaaagcaagaagttaccggcagaattgttttttgctcctccagaatcacatggtcttcacctaaactctgtttcttctgctttggtggctccttttggtgctgctgtactggatgcccattttccactgccattccatttagcaactgatcattttgagaactgataccaagctgtatgtccaagatctcttcaattggttcagcttgtccatcagtctcgtcagtatcaagtct

SEQ ID NO: 1346 - protein, 95 aa, Homo sapiens [sequence omitted]

SEQ ID NO: 1347 - DNA, 678 bp, Homo sapiens
ttttttttttttttttttgatttgcctgctgctgctgccaccaacgtaggattgtcaggagcctgggaagcaagagatgaaggcaaaaaagaaaatagaaaaaaacctaacagacagccgggcgtgccggggcgccgtgtaatcccggcactttggggaactttgtttttaaacgtttacaaacaaaaagattttcgatgcataggccagtcctaatgcatcccataatggggaccaaggcaaaaacacacacacacaactacaaaatattccctaaaaaaatgcaagatcctccgaaaatcaagatctctctaccaaacaacataccaagtcatcacagaagaggtgaagatgcctctcaaaagacatgtgccacagaaatagagcttgaaatactgaacacgatttctcgaagatccttctcaccaccccaagagaagcgccctgctctggtgagggaagaggaggcaaaggagaagagagaagtttcccttccatctggatctgggtggatgccaaccctgacgtgcagggcagagcaccaggctgcaggaactggatgctaattgcaatcgctttttgctttggaacatttgccaggaacttgtgaactgctaaggggatgaccaggaaactggatccatctctgtggctggggatgttttgaatgattctcgc

SEQ ID NO: 1348 - protein, 122 aa, Homo sapiens
MHRPVLMHPIMGTKAKTHTHNYKIFPKKMQDPPKIKISLPNNIPSHHRRGEDASQKTCATEIELEILNTISRRSFSPPQEKRPALVREEEAKEKREVSLPSGSGWMPTLTCRAEHQAAGTGC

SEQ ID NO: 1349 - DNA, 445 bp, Homo sapiens
cctaggcctcattcgctggctccagctcttagacatgttgccatcgctactggagtcagtagggatctggcacaacacctcaagaacgttcctcagattcagttcaaggatctcgctcagaaatgggtctcagtgccccagagtgaagaacaagtccacatcccaagcctgcagtggagaatgagctcaggggccaatgatctggtggaagggcttgcccgagagagaaacagggatctccactgccaggagggatgaataaactcatctgaatcaacccagctaatctgtccacccatcaatccagccaacaacttagaaaaaatgctcaaaatatgagaaacatctgctaaagatatgagattaatgaggttataaagaatgaccttgtttaggactatttaaagtctagaggtgactgctgatgctggaagagtgacgacaa

SEQ ID NO: 1350 - protein, 60 aa, Homo sapiens
MGGQISWVDSDEFIHPSWQWRSLFLSRASPSTRSLAPELILHCRLGMWTCSSLWGTETHF

SEQ ID NO: 1351 - DNA, 407 bp, Homo sapiens
agatcttcaagttcactttgcaacagatttgctttgcagtattgcattcataattataaatgacttctaaaataaagcattcagaatagcttctaaaatcgctactgttaagcagagagaggttgttgaggagagggtaattaaatgactatatatatatttttttgcatttctaagcaacatggtaactgtgtgcacctggacaatcagataaggaataatcagataatgaattccactcccccttctctttctcttccagtctgtcttcctctcactctccctcattctttccctgtcttgtaagaatcaggtgtcctccaaacctcctgctgtctttgccttcagtcccagggagggagctttggatccatgcagcatgtgaggagtcaggaggccccagctcc

SEQ ID NO: 1352 - protein, 73 aa, Homo sapiens
MRESERKTDWKRKRRGSGIHYLIIPYLIVQVHTVTMLLRNAKKYIYSHLITLSSTTSLCLTVAILEAILNALF

SEQ ID NO: 1353 - DNA, 349 bp, Homo sapiens
  misc_feature (70)..(222): Wherein any n is one of a or t or c or g
ggatcccacccagcatatcgcattacatttagtagtcatgtgtctttaggttcctcttggctgtggtagnttctcagaatttccttagtttcgatggccttcatagttttgagaatgactggtccggtattttgtagatgatccctcatgatattagaatggggtaatatattcttgagaggaagaccatagaggtaaagtgccattctcatcacataattnaagggtacctgttggcatatatctatcactatgtatagggaagctgggcatagtggtcactcttgtaatcctagctacttgggaggctgaggcgggaggatcacttgagctggaggctgtagtgcac

SEQ ID NO: 1354 - protein, 58 aa, Homo sapiens
  VARIANT (48): Wherein Xaa may be any one of Asn or Ile or Ser or Thr
MRMALYLYGLPLKNILPHSNIMRDHLQNTGPVILKTMKAIETKEILRXYHSQEEPKDT

SEQ ID NO: 1355 - DNA, 373 bp, Homo sapiens
gctagcagcattctgcccctcagatgcgccggcaggctccactggctccaaaggacgcccttggatggatcagcaattccacgaacatccactaaaccaacacttagcactgctcagtggggtcaacagtgcccggtggtccgctgcaatgaatccaaacacatctgtgcccagagctacaaggccatgtgcccatcaactgtcccgactcgcaggcaatgcacgcagccctgcaccacttccctcctgcccaccacggagcaggggacagttctgtgagtgaacagaagcaggacatcggcagagccggctgacgatggaggatgagatgctgccgagatgctggagggcagatcactgaggatgaacacgc

SEQ ID NO: 1356 - protein, 72 aa, Homo sapiens
MDQQFHEHPLNQHLALLSGVNSARWSAAMNPNTSVPRATRPCAHQLSRLAGNARSPAPLPSCPPRSRGQFCE

SEQ ID NO: 1357 - DNA, 368 bp, Homo sapiens
  misc_feature (1..(6): Wherein n is one of a or t or c or g
nccctnatgtgtagacagtgctgtatcatcactgcaagtgatgcattctgtttacccactgccttcccaagggatccctggggagaagagagacagaaaaaccttggagaaagtaaatcttctcagtttgtttaaatataccaaaaaatgaaatacaatctgttaagtttgtggaagtctgcaccatctggttaaatgcagcttgatggtttctggcaggcaacatctgcgggttagagaaagtggcctgccgctccccctcagcagggaagacaaaagagccccaccttatggctttgccagggcatatgtcctcagtgtgcccctctgtcagagcagtggcctgtgtagggaggtggagtcccatg

SEQ ID NO: 1358 - protein, 112 aa, Homo sapiens [sequence omitted]

SEQ ID NO: 1359 - DNA, 387 bp, Homo sapiens
  misc_feature (1): Wherein n is one of a or t or c or g
ncagccccttcccatcagagacccctgaaagcttccttcctcctcaagcatttctcattaaaatataagtcactggagatgataggggtcaaactctacatttttctggctcctgtgaaaacagctgcacctgggatggtgcttccttctcacttcctaaagcataagcagcctctgttccatgtgtacaaagaaagttgggaggatctggaaaccactttatatcctggccagaagctcactggggttacttcagaggaacaagggctttattattgggatgcccagggcctggcatagagacagaaaagcagtcaagaagcaggctgtttaggtgcctgcaataacaatgatgatgaagataatgatggtgataatgatgctagc

SEQ ID NO: 1360 - protein, 73 aa, Homo sapiens
MIGVKLYIFLAPVKTAAPGMVLPSHFLKHKQPLFHVYKESWEDLETTLYPGQKLTGVTSEEQGLYYWDAQGLA

SEQ ID NO: 1361 - DNA, 560 bp, Homo sapiens
  misc_feature (403)..(530): Wherein n is one of a or t or c or g
agatcttgggacccaggtggacgtgattccctccttcccagcagggcaacccacagctgagcaaggctggcggggaggactgtgggtcctcacccctgtgggtcccctgccactgtcccagcacagcaaaacctaaggactgcttccccttccagaagcaagggggaaagtgagcagcatccgaactagagaggtatttgtctgacagtttctagcaggaatgtctgtgaaataactggggtgtgcagaacctgttgtgggaatacccacatggggtggaaggggaagcctcgcgtgccagcagagagcgggaggaagggagaaagaaaaaaccaacaactgctcatcagtgaaaagtctaaggacccctctagctctgccacagcaccgtggggcccccctnccctggcatttccagctcgattggttagcaaacgccacctcaccgtgcaggggcacctccagcctgcttcacgctccacccacctctcccaggctcctgtctcagacacagggcctgcaggtccgtntctgtcacgcccctcctcccaagtctaggg

SEQ ID NO: 1362 - protein, 95 aa, Homo sapiens
  VARIANT (45): Wherein Xaa may be any one of Ala or Pro or Ser or Thr
  VARIANT (87): Wherein Xaa may be any one of Cys or Phe or Ser or Tyr
MGWKGKPRVPAESGRKGERKNQQLLISEKSKDPSSSATAPWGPPXLAFPARLVSKRHLTVQGHLQPASRSTHLSQAPVSDTGPAGPXLSRPSSQV

SEQ ID NO: 1363 - DNA, 385 bp, Homo sapiens
tcatgattgtttttcttacaacctacactttattgatttatagcaggaaattagaatggagaagattaaaagcttaaagacattgaactgtcccagaatgataactttagaacttgaatgaattcagaaatctgaaaatttaatgaatttaaattatattgtggaaatttcgaattgctttaggactggatttagtccatgtctttcaatatatcagtgtgttgtggtttcacagacctacaacaatacacagaaatatttgatacaggttgctatttatagattttcttcttgttatttggtttgaaagtgcatatgttattgcactttcatgcagctaatatgatggttattggtcatcagtaataatttcttgagcccatgg

SEQ ID NO: 1364 - protein, 54 aa, Homo sapiens
MNLNYIVEISNCFRTGFSPCLSIYQCVVVSQTYNNTQKYLIQVAIYRFSSCYLV

SEQ ID NO: 1365 - DNA, 802 bp, Homo sapiens
gcggccgccacactcgagcccgggcccccggcacgtctaggccgcggcccatgggctccgccgcctgcccccggggagccttgccggagctcgcgccctgctgccagccccgcgagcagtcgcagccccacacgcgatgggacgcgggctgtgggattcagcaccccgggggcgaggaattcaggaccctcggcggggcaagggcctatagggttccgaactcgcaggagggtcgctcctcccctactcgctttttcccggcaccggaaggccccgcccactgctttgtttcctctccagaccgcgcattttgggtctcggaagaggttcagaggctgttgttgagcaatgcatgccaggtcagctgagctagcgggttatggatgcacggattcggaggccagctttttgacaaccttgtaaaggaatccctggcggcgaccttttcgttgtttaccaattgtgccggaaaggttttctcctagtgttcaggaccatttgttgttctggttagattggacgctgaaagcagtatgtcaggtccaggatgagcgctatagaattctgagaagttacccttctctgtgtgccctgactactgaacggggtgggtgcttgttgaaaatttcaagattactggatgtacttgagcagtacaatttttgttgttagttaatacgtaagtagatttttggccattattgagttttgtttttattgttttcgtcattccatgcggattcgattttgtgctcttaattagaatttctggattggaaacgttcagaggcacatcacgcgt

SEQ ID NO: 1366 - protein, 105 aa, Homo sapiens
MGSAACPRGALPELAPCCQPREQSQPHTRWDAGCGIQHPGGEEFRTLGGARAYRVPNSQEGRSSPTRFFPAPEGPAHCFVSSPDRAFWVSEEVQRLLLSNACQVS

SEQ ID NO: 1367 - DNA, 479 bp, Homo sapiens
  misc_feature (1): Wherein n is one of a or t or c or g
naattcggcacgaggccacaggccacgcggccacgcagtccgagcgggagccgagccgggcggggcgagggcagctccgggaaggaacgtcccagggatggaagtgcttggatgcggtgctgctggctgcggatgtgcgcaaggagatgggatggagagcctgagttggcattcgtataaatgacctgcctggctcccaccatgagtgctgagcttaacgtgcctatcgacccctctgctcctgcctgccctgagcccggccataagggcatggattaccgggactgggtccgccgcagctacctggaactggtcacctctaaccaccactcggtacaggccctgtcgtggcggaagctctacctgagcagggccaagctgaaggcctccagcaggacctccgccctcctctccggctttgccatggtggccatggtggaggtgcagctggagacgcagtaccagtacccgcggccgca

SEQ ID NO: 1368 - protein, 99 aa, Homo sapiens
MTCLAPTMSAELNVPIDPSAPACPEPGHKGMDYRDWVRRSYLELVTSNHHSVQALSWRKLYLSRAKLKASSRTSALLSGFAMVAMVEVQLETQYQYPRP

SEQ ID NO: 1369 - DNA, 669 bp, Homo sapiens
tcactggacagcgagtccggaaatcatccttctccaccaagctttcccacttaatagcttggtaacctttgacagatgatttctttctttcctaatttgtagcatggggacagtgagggatacaacagcagtttctgaaacagcagtgaccaccatttactgcatttaccccaggccaggcactgtgtgtgggcatggcatttaatcccggtaacactctataagataggggctgttatgacctcatttctccgatgaggaagccagggctcagagaagtgaaggcatgagccccgttgttatgaagtcattagatagtagagctgggatttgaacccagagccccactctacctttgagccatgctgctactttgacaaacttttggatgactttgggagatgggaccttggggaaaaatgcactttgaaagaattggatcatttcagtagaaacctgtaaacgtgtgtcttaaaaaaaatgtcagtgacagtttgcttctcggtgagatgaatgcagataaacctattttgactgttaacttattttgttgcttaaaagccagtgacatgtagtgttgaatttatttttcttcacaacatttaagtgtttgccacttcttgagtgacgtgtgtgaatttgggaattgcctgtactttgggaatggag

SEQ ID NO: 1370 - protein, 57 aa, Homo sapiens
MIQFFQSAFFPKVPSPKVIQKFVKVAAWLKGRVGLWVQIPALLSNDFITTGLMPSLL

SEQ ID NO: 1371 - DNA, 1059 bp, Homo sapiens
gacaagcctcctcaggaaattgcccaaaatagccacatgtggcaagcctcattgacaggccaaaagcctcagtcaacatggccgcgaccggcttccattgcccttcactgcccgcagtaaggatggctccggtgacttccttcgaacctcacatttcccataaaaaagatggcgccattgcttccgcgttccggttgcggatggtgagtgtgtcggggggcttggcggcttttctcctcagttttctggagtgctttggaggagaggactatggcagccagggacgccacttcaggcagcctgtcagaggagagcagtgctttggacctgccatcagcgtgtgacataagagattacgtcctgcagggacccagccaagaagccaacagcgaggctttcagttctttggaattccattcttttccttattcttctgatgtggatccagcagatctctgagaatgcttcattgtcttaggcagaaaaacatcttacctaagcaaagctttcaggaggaacttcaaaggacagcttacctggcacagcaatgacaaggagctgtttcctggatgtctttttgttattgttgctgttaatctcaggtctctttctaatctccctcaaaatgaattcagaagcaggggaatatttggttcaacaaagagagagtggaatttttttttgttttgttcttttaaaacttcagaaaatagcaatgtgggcctgttatgtgtgatgagtaataaaaatagagactttagcattccttgtatgaagtatgctgtggatttaagtaacaacctttctacaaggtttcctgactagattgccgaaacatctattatttaaactaatgataattccctgatgtaggtagtggccgtctttagtggtaaagccctctctttcatattaattacctgatctgagtctggaggcccgcagacctggatttatttatttattcatttatttcttgttagttttggttaatcccctgggtttatcacacagacctggatttaaagttcagctctgccacttgctggctatgtgact

SEQ ID NO: 1372 - protein, 88 aa, Homo sapiens
MAATGFHCPSLPAVRMAPVTSFEPHISHKKDGAIASAFRLRMVSVSGGLAAFLLSFLECFGGEDYGSQGRHFRQPVRGEQCFGPAISV

SEQ ID NO: 1373 - DNA, 500 bp, Homo sapiens
atttagacaggctttatttacagtacacatgttttcggctcgttattctggaggcgggaatggaaactgggcagagcaggagttctccccgtcagcctcacgtttggaaggagttgagagtcagccgagtcgaaggatcccgctcctgcttgctgtgttctctagggagataatgtcgaagaaaacagtgaaggggtgggagtggagggcgctggggaacacagagcgtcagcctctcccatagtgcccacgcttcaaaatgcataacacccagaggaaggtgagacatcctcatgcccattttagagggttcagagagggcaagggccgcagaaggtcacacagacaacaatcggttgtgcgaaaagggtctttaactccatttcttgggcttcctcacgggtttagacctccaggattacccaggtcttggtctctcgggattccgggaagggtctttcctggcgcctcgagtggaggtcaaggccagccaggcgact

SEQ ID NO: 1374 - protein, 80 aa, Homo sapiens
MHNTQRKVRHPHAHFRGFREGKGRRRSHRQQSVVRKGSLTPFLGLPHGFRPPGLPRSWSLGIPGRVFPGASSGGQGQPGD

SEQ ID NO: 1375 - DNA, 521 bp, Homo sapiens
  misc_feature (5)..(245): Wherein any n is one of a or t or c or g
agccncccctcaaactgatgagagctccctagtctccccaaatgttcaggtacctcacagtatatcctaaaactgacagtaatagcctcgcagcccccaaaacttacaggaatcttaacgcttccccaactgacaggaacctcctcacgccccaaacctgacaagaacgtcttcagtccagaatcctacagggacctcctcatgctttgggctgcaaggactccacgcccgcggagctcagccnnccagcgacacgccggcagccgggctagctccgggactgcgaagcgcctcagcggaggctcgtccggtagttccggcccctacggcgacgcgcgtcgaattctgggatagtccccgtaccgccgggaacctcgctcgccttcccctcgagccccccgctgggtcgcgcggcgccagccgctcaacggtgcttcagagcagcctcctccacaacattcccctcggcccggccgttcgggcctactggagaccgcggcttgggcctagtctggcggccg

SEQ ID NO: 1376 - protein, 51 aa, Homo sapiens
SPYRREPRSPSPRAPRWVARRQPLNGASEQPPPQHSPRPGRSGLLETAAWA

SEQ ID NO: 1377 - DNA, 1012 bp, Homo sapiens
tttttatttgttatactaggcctatttttagtgatgaaccagaggctcatacccacaaatcttttcttccagtctttctgtgaggccacatgccctgatgaaggtccttttcagctcccaaattctatgattctaagtcagaaagattaagatgcaagttatttccaaaaccctccaggcagaaacacaaaagactatttgagagattcattattcactctctattgcctcagtcactttctatggatgatgattcatggagaataatcaacagcagagaagatctgttcaatgctaggagagaaggcagtaaagccgaaactccttcgcgtgttcagttcctattctccagtatgcatcttcacttgttaagcggcggcagcatttcttggcctcgctgcctttcttctctgggaatttgaggtcttctcttggtatagactgttgctagtgcagtcactgcccacccggcaccactcctcaaaatgccagggagaaggtcctgcctctctggccaagcaaaagcccgcacagaagcagctgtcaccagtggcactggctcttctcagggtgtccaggctgaaatgtttagcatgcccaaggttgatgtctaatcacagctacgagaattctctggctcttcctcagtggctttcatcatttcaatagtccaccttagggcacatccctcctgctttctgaagagcagaatagctgaatgagtgctgtgctgaaaactgggagaccacattccgtcaccatacagaccaacctttttgggttgagttgctccatctgtttatcttgtctccccttctctcccatgtaagttcttgagagcagggacctcgcctgtcatactcagtatccccagccctacagccttgccaggggcgcagccgaccctcggcggctttgtgtgacaggcgtgaaccggccaagcggcggcgtctctgctccgcccgcgagggcagggctgcgaggatttcactctaggagtgaggcgggagcc

SEQ ID NO: 1378 - protein, 59 aa, Homo sapiens
MDDDSWRIINSREDLFNARREGSKAETPSRVQFLFSSMHLHLLSGGSISWPRCLSSLGI

SEQ ID NO: 1379 - DNA, 1711 bp, Homo sapiens
ttttttttttttttttttttttttttttttttgctctagcagcatttttatttacaaacagcaatgtccattgactttatttataccataaaaaagccatttacaagcaagaaacaagaattcagaacaaaattaagcagcactgaaatattcatgtcacaaatctaaaacaaagtgaatacaagagtaaaatatcatttgaataaatagtcttaaattcatgctataaaataatccttaatggcaagttactagttgatacagcatccgcttagctagcttcatttacttcatatggtgatgaagtgtggagttgtgaggttaccagtttatattgcaagataatgacactgtgttaagtcattcaaattgctcaaccatttataacggaaaaaaatgttagccctactaataaaagtggtgagagagatggttttcacattaggaaaatggtcattctcaaacaaaccaggtaagtttacctcttacaatagtcagggcagcaaccaaaggcttgggcagcaagtccaaaggttgaattcacagcatacttgtcactgaggggcagcaagaggtctgtggactgaatctgctacaaggagagccaggcaaggctgactccaggacttgatcaagaactacaatagccccgtctgtgccagactcaggaaggaaaccagagaaagcaggttctcttccgggccgagaagtcaagcactgggcagaaacagtgggaacactctggcacttactgaaaaagacgcatgtgacatgtgacaaccattacaaatttggaacaatgtgaatgacttttctgaacttttagttcagttgcactgagtaatatgaaatctatgatttatgaactagatagtttcatataaagaatttacataattccccaatactttcatatataaaatttaataaataaccctgaccagtctagaagcaccattcaagggcatgtgcccttggaaaatagtttaggtgttgcatatttgagtccctttcagtggaggcttcacaggaaaccattacagaatttaacaataacgaggacaacaacaacaaaaatcacagtaactaagagaaaaagttgataaaataaaatacattgatctctttaaagtaaagctcattcacatagatgatttcccccccagcccttgtttcgtgttcctgcaaatttttcctagggtctaggctgtaagaacaaaaataaaaacaaaaccacacacaaaatacgcaggtctatatggtctgggctaagggaaaaacaaagagttggttatatttgctatcattagaaaagacatttactcatgctctggaagatttaaaaattatcattttcgttctacagtatattctgctcaacagtgaaccgacagtatcctttctgctgtttaaaaaaaaaaactaaactaaaacaacaacaacaacaacaaaaaacacaactgccaaggcagggccaattggttgggaggctttttccactgaccaaaaaattaacttgtctccatatactgtatttacaaatataatttctaaatgtatttacagctttagtagaaattagagggtagagaactgattagaatgaaaataactgtttaaaaccacaaacattagtaaaagtataaaattctttgtcttcacagtttgtaataacaggctaaatatctctagaaaaggacgctgtcactgt

SEQ ID NO: 1380 - protein, 55 aa, Homo sapiens [sequence omitted]

SEQ ID NO: 1381 - DNA, 1059 bp, Homo sapiens
  misc_feature (1053): Wherein n is one of a or t or c or g
aaattttccagaaagctaagctttatactaataagatattggttggtagtaggaacttcaaaaatgaatgagtttgccataactttaattttctggattagaaacacaaaacttgaaatgcaattatcaatattttgtaatatatattcctacagtttgggtagaaataaggaacatgtctgctagatctggtttatgaaaaagtgaaaaatattaaatacaccagagactcaaaccctttcaaggcacacaataactgttctggatttacctgacaaacctagttgagtagcattttgacagaaaatatcagactgaaagttcattcaaatgtacttaaatgtacaatacagtgttcaatagtttttattgcagtgatgtttttccaataatttaagtaattctcttcctagtataatacagttttcataaataatgtttacttgctttctttatattttcaaataaaattaaaatgctcgagcactcctttcagaaagttataaaattaaaaataattattttaaatgctcattcaaatgtgtctgtatacttgctatgcccctttttctataattccaaactgagactgatttttcagagatttttaactttaataattttaaatctagaatcaagtgaaacagatatgttaaatactgagtctagttttcttccatcttatggagcttcatggaataagaaactaatctagtgcaaatgaagattaaatatttctgggtgatggagagatagtcaacaaatttatttatccatcctctgcacatcagtccactggagcaggagttctacacattaaaaatgtaatgggatcagcctagcattgtttggtgttcttttgttgtattttttagaatgggggtgggggcctaagtgtccttatgaagctgtggtccacgacaggagcttgttgggggagtaccagggttctgctgctttcctgcatctgagcaacacaacagagatcatcagttttaaatagagtagccctcacaattcaaaatatccataggatataattgtaaagttatngttgct

SEQ ID NO: 1382 - protein, 79 aa, Homo sapiens
MLEHSFQKVIKLKIIILNAHSNVSVYLLCPFFYNSKLRLIFQRFLTLIILNLESSETDMLNTESSFLPSYGASWNKKLI

SEQ ID NO: 1383 - DNA, 530 bp, Homo sapiens
tttttttttttggcagcaaatctgtatctttaattttattgacagcagttgagagaacaggcttttgacagcaataactgccagtttctccagcctcacggcctggttgtggagctagaatccccagaggccagctgagtgctggtcggaagtcggagtcagccagcacatctggccgaagcagagggggtgccaggcttctgactggggtgggaggcagctccgactctgcctgttatagccagaaagaggccggctaaaatccaaggtgaccaggtcccagctcagtgggcagcaggcaggtggaggttctgtctgtgggtcccagctctggtctactcttggcatccctgtctccctgggggtattctagctttctgtgctctgctagaggaaggcacttgagcacacctggaaacaacttctgctgagaaagacccagccaggctcccacacttggcagcaggagaaatgttgatccagacagggtaagtgacttgcccaaggtcacacagcaatttcatgagtct

SEQ ID NO: 1384 - protein, 77 aa, Homo sapiens [sequence omitted]

SEQ ID NO: 1385 - DNA, 758 bp, Homo sapiens
cggctgggccgcaacgcccactcctgctgcctgcagtggaatggacgcagcttctccgtctggtttcatgggctggaggctcccctgccccaccccttctcgcccacggttggggtctgcctggaatacgctgaccgtgccttggccttctatgctgtacgggacggcaagatgagcctcctgcggaggctgaaggcctcccggccccgccggggtggcatcccggcctcccccattgaccccttccagagccgcctggacagtcactttgcggggctcttcacccacagactcaagcctgccttcttcctggagagtgtggacgcccacttgcagatcgggcccctcaagaagtcctgcatatccgtgctgaagaggaggtgatgccgggcacgggcgctcctgctgccgtctctgctccaggaagctgcctcctctgggccctctccttcgtctgggaaggcaccagcatgagtcccacacacccagccttctcatttctagaggcttccacctttttatacactcagccttccctctcccaggcaggaggacccccagaccctgttcccctgcagacctcacttctgggagacagagctacagctgggacagctccaagctaccctaacccctcctttcccaggtttctagaatagtgtctggcatgtagtagatgctcaataaacacttgtcgaggggcccgatctgcaagtggggtccgtcgaccggccgctaatttagtagtagtagtaggc

SEQ ID NO: 1386 - protein, 127 aa, Homo sapiens
RLGRNAHSCCLQWNGRSFSVWFHGLEAPLPHPFSPTVGVCLEYADRALAFYAVRDGKMSLLRRLKASRPRRGGIPASPIDPFQSRLDSHFAGLFTHRLKPAFFLESVDAHLQIGPLKKSCISVLKRR

SEQ ID NO: 1387 - DNA, 1054 bp, Homo sapiens
acgcgtgctggatacagcggacccgcgcaccccgcggcgaccccggagtgctcgggctggagcccggagagccctgcttgaaacggcttcccccaggaagttgagtggccaaacaaggacgatagccagagggcgttcccatggagccagggcagacggacagactggttgcttggtgctttgccgatagtctgttggcagatcggcccatattcaggccagtgggcacttggaggaacagacacctcggacgctgctgaagaacatcctactaactgccccagaatcttccatcctgatgcctgagtcggtagtgaagccagtgccagcaccgcaggcggtccaacccatggttttcttcttttacattctcttgccggttgctgacagagcctcaagggaatgctgatgcctcttccctcaccaggtgctgctctgggtgtttcctgttctgggagtgggtggaggagagacttggggagggaggtgctgcctgggatggaatctgcccatactacttcctaccagttttagcctcacagcatctgttctaagagatgagagccccagggcagatggagggatctgtgggcaaactgggtctcaggtacctgactttcctctgtgcctccccacctcaccagatccctcaacctgacctttgccacacctcttcagccacagtcagtgcagaggcctggcttggcccgcagacctccagcccgccgagctgtagacgtgggtgcctttttgcgggatctgcgagatacttccctggctcctccaagtaaggttgggttttcccctgctggcctttggggaaagctctccccgctgaagccgctccagggcagtctggaggatttccaccacggcttcttccttctcgtcaccctcctctggcatttccgactcaaggagctggaaggcctggctcatgtaggtgttcactgtccgcttgtccaggctggggtcgatggtcatcaggccccctcgcagcttgggcagagtcacttcctcatggagttctatgccaagctcctgctttagctgc

SEQ ID NO: 1388 - protein, 99 aa, Homo sapiens
MTIDPSLDKRTVNTYMSQAFQLLESEMPEEGDEKEEAVVEILQTALERLQRGELSPKASRGKPNLTWRSQGSISQIPQKGTHVYSSAGWRSAGQARPLH

SEQ ID NO: 1389 - DNA, 578 bp, Homo sapiens
ccggggccgagacgatggctgaccacaaccctgacagcgactccacgccgcgcacgctgctgcgacgcgtgctggatacagcggacccgcgcaccccgcggcgaccccggagtgctcgggctggagcccggagagccctgcttgaaacggcttcccccaggaagttgagtggccaaacaaggacgatagccagagggcgttcccatggagccaggtctgttggcagatcggcccatattcaggccagtgggcacttggaggaacagacacctcggacgctgctgaagaacatcctactaactgccccagaatcttccatcctgatgcctgagtcggtagtgaagccagtgccagcaccgcaggcggtccaaccctccagacaagagagcagttgcggcagcctggagctgcaacttcctgagctcgagccccccacaaccctggctccagatctgctggcccctggcaggaggaaacagaggctgagactgtcagtgtttcagcagggagtggaccaggggctgtctctctcccaagagcctcaagggaatgctgatgcctcttccctcaccagatct

SEQ ID NO: 1390 - protein, 188 aa, Homo sapiens
MADHNPDSDSTPRTLLRRVLDTADPRTPRRPRSARAGARRALLETASPRKLSGQTRTIARGRSHGARSVGRSAHIQASGHLEEQTPRTLLKNILLTAPESSILMPESVVKPVPAPQAVQPSRQESSCGSLELQLPELEPPTTLAPDLLAPGRRKQRLRLSVFQQGVDQGLSLSQEPQGNADASSLTRS

SEQ ID NO: 1391 - DNA, 747 bp, Homo sapiens
  misc_feature (1): Wherein n is one of a or t or c or g
nccacagtggtgaccagcccaatccctgagatggaggccatgtcccccacgacacagccaagccccatgccatatacccagaggccgctgggccagagcacatcccaggcaccggagcaggtagagactgaagccacaccaggtactgattccactgggccaacacccaggagctcagggggcactaagatgccagccacggactcggccagcccagcacccaaggccagtacatggtggtcaccactgagcccctcacccaggccgtggtagacaaaactctccttctggtggtgctgttactcggggtgacccttttcatcacagtcttggttttgtttgccctgcaggcctatgagagctacaagaagaaggactacacccaggtggactacttaatcaacgggatgtatgcggactcagaaatgtgaggggggcgggggcctggcgggaggcctggccccttcctcgtcctttccttttgcctttgagaccaaaccaagtgcttccaaattcttttggtgcaattgaggagatatgccagatgcttaaacacatttaattgctgtcagattaattccatgatcactaaagagttgctgcttttttcatatttatttttgtaaatgattctgtgcccaggagcagctgggggttccacctcagggtggggcgggcaggaccccgtctccccaggtgtcggagcctgacctgaattaaagtactgactgctcgccaaaaaaaaaa

SEQ ID NO: 1392 - protein, 90 aa, Homo sapiens
  VARIANT (1): Wherein Xaa may be any one of Ala or Pro os Ser or Thr
XTVVTSPIPEMEAMSPTTQPSPMPYTQRPLGQSTSQAPEQVETEATPGTDSTGPTPRSSGGTKMPATDSASPAPKASTWWSPLSPSPRPW

SEQ ID NO: 1393 - DNA, 651 bp, Homo sapiens
agagagagagactagttctctcttactctaggcctttcggtttgcgcgagcgggcaggaaagcgtgcgtgcggctaagagagtgggcgctctcgcggccgctgacgatggaagaactggagcaaggcctgttgatgcagccatgggcgtggctacagcttgcagagaactccctcttggccaaggtttttatcaccaagcagggctatgccttgttggtttcagatcttcaacaggtgtggcatgaacaggtggacactagtgtggtcagccagcgagccaaggagctgaacaagcggctcactgctcctcctgcagctttcctctgtcatttggataatctccttcgcccattgttgaaggacgctgctcaccctagcgaagctaccttctcctgtgattgtgtggcagatgcactgattctacgggtgcgaagtgagctctctggcctccccttctattggaatttccactgcatgctagctagtccttccctggtctcccaacatttgattcgtcctctgatgggcatgagtctggcattacagtgccaagtgagggagctagcaacgttacttcatatgaaagacctagagatccaagactaccaggagagtggggctacgctgattcgagatcgattgaagacaga

SEQ ID NO: 1394 - protein, 181 aa, Homo sapiens
MEELEQGLLMQPWAWLQLAENSLLAKVFITKQGYALLVSDLQQVWHEQVDTSVVSQRAKELNKRLTAPPAAFLCHLDNLLRPLLKDAAHPSEATFSCDCVADALILRVRSELSGLPFYWNFHCMLASPSLVSQHLIRPLMGMSLALQCQVRELATLLHMKDLEIQDYQESGATLIRDRLKT

SEQ ID NO: 1395 - DNA, 679 bp, Homo sapiens
cggccgcctgcggactggagacccgggaggacggacgcggacgcgggctgctcgtcttttacggcccttcaacgcccaccacgacccactcctcttggagaccccgggcgacggtggggctcttgggcattctgagactgcgcttggtggagaccccgggcgacggtggagctcttgggcattctgagactgcgcttggtggagccccctactggccagactggatttctcagcctgcgactcagccccaggctacacgaaagaagccagacctggcttttactgcctcctgaggccttcgtcttgttcacactgagtgtccagtccctccaaatccggctacactctactggcaaggagcacctgggccatgttttagagatcatccgaggactaaccccaaaagtttatgaagagaaagcagaggccgagctgaagagatagacccgggtcacacccaggtaaaggcaggatctaaactgaaactggtgtcagatctggttgccttgcacccctgatatcaggtgaagcaacactgggcaggatagagcagagtgaggtcagagtgtgaagatccagcctgatgcccaaactgacgcctcttcattctcccctgctccatctgtaaacgtcacggttaatccatctactttattgcattatatagagaaataaatga

SEQ ID NO: 1396 - protein, 105 aa, Homo sapiens
MISKTWPRCSLPVECSRIWRDWTLSVNKTKASGGSKSQVWLLSCSLGLSRRLRNPVWPVGGSTKRSLRMPKSSTVARGLHQAQSQNAQEPHRRPGSPRGVGRGGR

SEQ ID NO: 1397 - DNA, 672 bp, Homo sapiens
  misc_feature (1)..(2): Wherein any n is one of a or t or c or g
nngcggccgcggcggtggcggagactgtggctttaagagcgtgccgggagcccgagccccagccgggccgcgcttcgccgctgcgcaccccagcggagccaagccccacgctggccggacagggccgcctgtcgccgggctgctgagaactagccctagacctctgcgtgagggttcttctgccgaagacatcaccagtgtgtggagcctgccacacccacccgctgccaaaccacggcctttacctgtgtcttccggtgtttcccgtgcgacccatcctgtgggagtgcctcgtgggctgccccagagttcaccccacactcagcagcaccaatggtgaagatgacaagatcgaagactttccaggcatatctgccctcctgccaccggacctacagctgcattcactgcagagctcacttggccaatcatgatgaactaatttccaagtcattccaaggaagtcaaggacgagcgtacctctttaactcagtagttaatgtgggctgtgggcctgcagaagagcgagtgttgctaacaggactgcatgcagtcgcagacatttactgtgaaaactgcaaaaccactctgggctggaaatacgaacatgcttttgaaagcagccagaaatataaagaaggcaaatacatcattgaactagcacacatgatc

SEQ ID NO: 1398 - protein, 113 aa, Homo sapiens
MVKMTRSKTFQAYLPSCHRTYSCIHCRAHLANHDELISKSFQGSQGRAYLFNSVVNVGCGPAEERVLLTGLHAVADIYCENCKTTLGWKYEHAFESSQKYKEGKYIIELAHMI

SEQ ID NO: 1399 - DNA, 398 bp, Homo sapiens
gtttaataaactgccacacaacacagctgagctccacacagccacatgaggatggggacagccattccttgggtttctgaataacgtatcaagtgagcagtgaatttcaatcaagcttgtacatcaggaccgtcttgccaaaacaacagttgcttttggctgctggaagctgtagcttttcaaaacgttcacacatttcaatgtatcgtcgatgtttttaaatagacttacagggagggtggcacacagcaaaggcccgcagggtcagctggtccgacaggtgcgactccaccagggagcacgcagggacaaaggaggagacatagccaccagcttccaggccatccagggccccgggtcgccttgggatccggacccggtacaggccattcagggct

SEQ ID NO: 1400 - protein, 62 aa, Homo sapiens
MFLNRLTGRVAHSKGPQGQLVRQVRLHQGARRDKGGDIATSFQAIQGPGSPWDPDPVQAIQG

SEQ ID NO: 1401 - DNA, 643 bp, Homo sapiens
  misc_feature (621): Wherein any n is one of a or t or c or g
agatctcaaacagcaatgttccgcctaatgaagtacagactggagattgccagctgcacccaaatccactctctcccccattcttgaatacagaactccactttcactcagggcaagtccatcaaccaagagggtccccgagctttcttagagtgacaaagctttggctaatgagctgtaagcagaagtgtccagaccataagaaggcattcagggcaagccgactcagcccggagccaggcccttcatctttcctgccttcctcccatctaccacctggaagatagatgccatggctccagtagctgtgcttcaccatgagggccttgggatggaggccagtgcctaggacagccatgggacaccacaccagcaactaactgaccacctcccacatcttccacatgagtaataaaacttggtttactggttaattattggtaaattattttcaggttaagtattaacaagtgtcattacaaatatacagcacagacaggtgcagtggtagtttcttaagggttagttgccacaggaattgggaagccttaacaatggttttttttctaatgtgttaacattaggaagtcattggtgtaaccttgcatttggaatgggtcntttaacataggacatgatttgc

SEQ ID NO: 1402 - protein, 78 aa, Homo sapiens [sequence omitted]

SEQ ID NO: 1403 - DNA, 597 bp, Homo sapiens
  misc_feature (1)..(2): Wherein any n is one of a or t or c or g
nnctctttgcctttaaatgtgccacttctctgaacctcatcaatgataacagccattccctcatagtctttttcactccagtaatatgtgcatttaggcagaaagcatgttcacctacattttctctctgcaggtgctttactccatgaactgtctaatgacggtgctcataagcagtttgatcactacctcgaagagctcatcttgcccatcatggtgggctgtgccaagaaaggagaacgagagtgccacattgttgtgctgacggatgaggattctgtggactgggatgaagaccaccctccaccaatgggggaggaatattcccaaagtaggagcttctggcatggcgtagatgttttcagcaagaaacttgctacctggagtagcagcttgatcctagaaccaatgtgaatatcaatgttgagcctgtgatgagcacactcacctggatgacaaatccctagtgatgcaggtctagcctttatgctggggaacacagtgaatgttgttcaccattcactctttctctggtgtctcgtactgtgtaagatactgaggcagcacattaaatgatggtgtcattcttctcttaaa

SEQ ID NO: 1404 - protein, 109 aa, Homo sapiens
YVHLGRKHVHLHFLSAGALLHELSNDGAHKQFDHYLEELILPIMVGCAKKGERECHIVVLTDEDSVDWDEDHPPPMGEEYSQSRSFWHGVDVFSKKLATWSSSLILEPM

SEQ ID NO: 1405 - DNA, 988 bp, Homo sapiens
tttttttttccctcatatatgagacacaagccttcctgatttccaaatgatggacctggctgcaaaacaatttttagattattctcagcaaaattttaatccaagttggcttcctcctgctacccagagtatttctttgtcaccaccttctaccactagtaagcatttttttaatattagcctaaataaaacacaatcagaaaaataaacctataaaaacatgataaaatgcattccaaataaaatgtttggaacatttagcatgttgggataatatgattggaatggaagagaggtctttatagtgaatgttctattttgatagataaactatatctaaacattgtaccagagagctatggacacttaaggataatctactgtaaaggtcttgagaccacacactctaatcagaaagaacttcataatgtatcttgctcaagttaagtcaattttaaagacatatatttaagccattatatgcatcagtttattgttcattcataaaactaattttataagcacataaattgtaaatttctgttacagttaatgtttcattaccactgtgagaggagatccttaaaaaacaatagtaagtcctattggtataagtcctttttgattattcttctcaaaccagtaaagttttgacattaggcacgattattttatcactttgtatgttttagaaaaaaaaagtgaatatatccactccactctgttctttaggaaaaaagtagcttttccaagtacaagagatcaactaacttgatcatcttttttaggcaatgattgaacttttcatttcacagagcataatccatcattttttaaatttggttccttagattataaagctaaagatgctaactcttatgtaaaatttttttacataaaagttgttactgtttcatttttttattctaaggagtatcaaactaactacatttataatctttgtgaaagttttcaaatctcattcatt

SEQ ID NO: 1406 - protein, 53 aa, Homo sapiens [sequence omitted]

SEQ ID NO: 1407 - DNA, 1076 bp, Homo sapiens
cgacaaaaaaaatggtatgtgaagatgcaccgtcttttcaaatggcctgggagagtcaaatggcctgggagagggggcctgcccttctctgctgtgtcctttcggcttcccagttgagctcccaagaccaggacccactggggcatataaaatctctgctgtatcctttcggcttcccagttgagctcccaagaccaggacccactggggcatataaaaaagtcaaaaatcaaaatcaaacaacaagttctgagttacttaggaaacagacttcgcatttcaatcagagaggccacagagcaaggtctaaacttctggcttctagacaaattcctgatagaacatttaaatgtgggaagtggcttccccaggtcccatcccctgtttagggatagagttgatatcatttttataggtgccatgtatgcctctgcctgaatttttttaattgacttttgagcttttgagattgcacgagggagaacaaggcctttgctgttgtggataggaaagacttaacctaaaattaaaccagcaagaaagcattagtaaaaatctaacaatatgaagggctcttatgagtcatttttttcaaaagatgaaaactccagaaacgcacaggaacgaaatacctctcagaaacatgaagcaatcatcgaagactcactggtaatatttttaaaaagtatacagatcaaagcaaaaagaagccatgtgtaacaaagagaaatgtgcaaatattttttaaggcagtattaagtgcaagaggagtaacatgaaataaacattctttcacatggctactgggaatataaatttcgctccagaaaggccgtagcagtttgacgataggtggcaaaaccttaagattgtgtactggggcccagaatttttatttctaggaatgtatcctgaggaaattatccgagatccccacaaactgcaatgtttaggaattgtccttatagcattgcatacacaagaaaaacagagaaaagcctgatccctgtcagtggaaaaggggttcaatgaattacggtgtgtctgcatgaggcttttatggacattaaaaatgt

SEQ ID NO: 1408 - protein, 125 aa, Homo sapiens
MVCEDAPSFQMAWESQMAWERGPALLCCVLSASQLSSQDQDPLGHIKSLLYPFGFPVELPRPGPTGAYKKVKNQNQTTSSELLRKQTSHFNQRGHRARSKLLASRQIPDRTFKCGKWLPQVPSPV

SEQ ID NO: 1409 - DNA, 816 bp, Homo sapiens
  misc_feature (1)..(166): Wherein any n is one of a or t or c or g
nnttttttttttttttttttttttcaagcaccaacatgtcaggtttatttctccttcgctctcaactgagagcggggcatccaaatcataacaaaaccagggcccaagagtgggaagcggccccctggtgggcctgaaccccaatttcacccttcccccgggcatnagggcccaggccaggacgctcacccgaatgtggctgggactccttgtgccctaggcccacggggcggaggcagcaccaacattggggatggtcccccaagaacagaggaggaagcccagcctccggcaggcagtatccacatccacgcccacctgctcaggcctgcagcctccagacctctagcgacaggtctccagagccggccaccaccaggttgccctcagcacagaccctattgagcccattgtcatgccttcgggtgcaaatggtccttggtgggtctgtgggcacgtgcacccggatggtcttgtcagtggatgtggtgtacaaggctcccacggagtactggatcccagtgatgggaaagctgtggcccacatcaaaggactgcaggaggaggatcaggcaaccctcagtcgaggctctcccaaggcccgccctcccccacaccaccaggggctcgggtaggaaggaagcccggggggagggacagtcaggggcaggagctccagcagacccggataagctggaagcagccgttgcggttggcgaagacgtgcagcaggccctggttgtcaccagcccagagctggggttcctggtaggacatgcagagcaggtaggagtccagctgcagacgctgcaggacg

SEQ ID NO: 1410 - protein, 111 aa, Homo sapiens
  VARIANT (33): Wherein Xaa may be any one of Gln or Glu or Lys
ERGIQIITKPGPKSGKRPPGGPEPQFHPSPGHXGPGQDAHPNVAGTPCALGPRGGGSTNIGDGPPRTEEEAQPPAGSIHIHAHLLRPAASRPLATGLQSRPPPGCPQHRPY

SEQ ID NO: 1411 - DNA, 1185 bp, Homo sapiens
  misc_feature (1152): Wherein n is one of a or t or c or g
tgcaataacagaaaaggaattgcatgtatgaagttttcaatcgtgggcttttctttgttgtggggagggggtcgggggatagtttgatttccattttctgaaaacgacagacttggattctgtttgtgtgtgcatattttatccagccttaagttataaagctcatctgtcccgctgcattccctgtgtattttcaggacatggctcgtgggtgtgtgtgttcattgtgtgcgtctgtatgtatttttctgtcatcactgttccctctcctcccgagtgtgcattcagttaatataatcagttgcttgcttctttcaaagtgctttgaaggtcttgaactcacgtgtgagcatctttatcaactatcccaattgcatgttctccatcacatattctcttatttgctctgtaccccctgagaatatgttttagagatattggaataaagctgtctgggtaaggagtaggcttagccgacctatgaataatacactttagtctagttctttattctaaatctggattgccagtattgtgtatttaaaccaagtctgtgaatacctgctttttttggccacagagtaacaagttttcatgtaagatcttcataccaaagtaggaagtaaaaatagcttagaaagctctgtcaggtgttttgtgcagctgacagaggtaatgttacatcacctaaaaaagaaagatacacggtcagttatcctaaaaataaattgtttggaaagtacaatgcaccacatttttgtagaagtctactatttgataaacagttgaaattcaagatgtgtttgacccttagtcatttttactctttggttctgagtatacctattttcttagcgtatctgccttgtttatctttttcttcaccttttaacaagtatgacataggaaagtcatttttttttagaattcatggatcagtctgatctactcttattcataatggaacatgtaaatatactgaaaactgtttttcaggagagaaatatgagttggagggaaggaaaagtggttctactaatgttccaaaatcctcatcagagaaggtatgatgttctcaggtgtggaaaatattttttagttgattgagaatgcaggtttaacagaagagataagggcataatgactgctggnttccagactggatttcccaccgcactattatgg

SEQ ID NO: 1412 - protein, 72 aa, Homo sapiens
MARGCVCSLCASVCIFLSSLFPLLPSVHSVNIISCLLLSKCFEGLELTCEHLYQLSQLHVLHHIFSYLLCTP

SEQ ID NO: 1413 - DNA, 573 bp, Homo sapiens
ttttttacagcactattttaaaaatagctattcaacataacaatcttaactttaatgcaccaaattatggttttcaacaatttaagtgagcatatcctgtcaccctcagcacatgtttgatatatacttgttatatatagatggatatagcaatatccatttgtctacacacacacacacacacgcacacacacacacgagtagagctacagggccctgcttaatagtgtgttctgaatttcatgttcctttaattgtcactgggtttatttatatgcagctacgatgtcatttgcagagcttactgtatttatccctgtcagaactttaaaagccacagagcttgtggagggtcaccattatgtctaaggacagaccctgtgctcagatgggcggactgcgctgtgaggtcagtgagaggtgcccatcacccaggcataccccagtgtgggcagcttttcccagtgctgaggtttctgttactgtcagacccaaagaattttgtttatttaaataactgttcatacgatttggattctatttatgtaaaacatagattcccccaaagaattc

SEQ ID NO: 1414 - protein, 72 aa, Homo sapiens
MFDIYLLYIDGYSNIHLSTHTHTHAHTHTSRATGPCLIVCSEFHVPLIVTGFIYMQLRCHLQSLLYLSLSEL

SEQ ID NO: 1415 - DNA, 339 bp, Homo sapiens
tggccagccgcgtctgtgccgccagcctctgactcgagcattatggggagccaggagcccgaaacggccgaggctgcagctcccgggggcccccttctcccctggaaaaggcctctcggcgggtcctggccgtggtgctagaagatgtcatggctgttcacatggtccccgtggtgccctcaaagcagacctccataccacagcaccacagctaccatcaggatcctgtccacaggcagccgctgcctcgccaccccggcagaccgggtggtcctcgcaggcaaggcctcccgaccctctgtgtttgtgtcgcgagcccttgagccgcatccaccggac

SEQ ID NO: 1416 - protein, 65 aa, Homo sapiens
MSWLFTWSPWCPQSRPPYHSTTATIRILSTGSRCLATPADRVVLAGKASRPSVFVSRALEPHPPD

SEQ ID NO: 1417 - DNA, 575 bp, Homo sapiens
tttttagtgtttcagtaatttcatttatttttaaatgcaaagggaaaagacaccgagcaaggctctcattttaagaacagtacttctctcatcaatgtggtggataagcctaaatagttttgctgttgctggggtgagttgttaagaacacctttctccatttggcacaggcaagtgtgttcgaaatagtgctctggatgaaagtcataatcattagctttgcagtattactaagcttctttaggatctgtgttgctattcaaatcttcagaacaaaatggcaggttgtccctggtgagaataaatgaatagccacaagttcgacccaacaagcaaatctgttcggtacaggaaagcccaaaatgttgacaaagcctccagggcaataatggttgttaagaactttcaaagcaaacaaaactcctgagaaacctacagcacagctccttttgaagtcaggttcatccataaattcggcaacagcaaattgcaagagcaggtataccactccagtaagtacagaaaatgcggtgataacataggcaaaccatctacttcccagtcttctttctaga

SEQ ID NO: 1418 - protein, 69 aa, Homo sapiens
MDEPDFKRSCAVGFSGVLFALKVLNNHYCPGGFVNILGFPVPNRFACWVELVAIHLFSPGTTCHFVLKI

SEQ ID NO: 1419 - DNA, 574 bp, Homo sapiens
accccgcgcgcgcctctctgtcgtggcgcggcttcccgcggtcttctctgcaaatgggctccgtggcctagcgcccccgtccccgccacccgtgatcgtgcgccgaggcccgcgaggggtcgccgcccagatcccaccagccagcaagctaaagcatggcggccatcccctccagcggctcgctcgtggccacccacgactactaccggcgccgcctgggttccacttccagcaacagctcctgcagcagtaccgagtgccccggggaagccattccccaccccccaggtctccccaaggctgacccgggtcattggtgggccagcttctttttcgggaagtccacctcccaccccccaccctgtaaactaggcggctgcagcaagcagaccttcgcatcaacacagcagacaccaaaaaccagtgagagccccgctctctaccgcccggccccagcactcgctagctttcctgacacctggaactgtgcacctggcaccaagcggaaaataaactccaagcagccagtagccccgatggtgtgtgcctgagctgtgtggcccgaggttccaaa

SEQ ID NO: 1420 - protein, 123 aa, Homo sapiens
TPRAPLCRGAASRGLLCKWAPWPSAPVPATRDRAPRPARGRRPDPTSQQAKAWRPSPPAARSWPPTTTTGAAWVPLPATAPAAVPSAPGKPFPTPQVSPRLTRVIGGPASFSGSPPPTPHPVN

SEQ ID NO: 1421 - DNA, 1027 bp, Homo sapiens
  misc_feature (196): Wherein n is one of a or t or c or g
cctgctgctgctgtccctgggggagattgagcacgcctccagactgctgggctactgtggggacctctacctcaccgagggcgtgccgcatggcgcctggcacgcggccgccctcccacccctgttgcgcccactgctgccgcctgccctgcagggtgctctccagcagtggctggggcctgcgtggccttggcgnggccaagatcgccatcggcctgctggagttcgtggaggagctcttccacggctcttacgggactttctacatgtgtgagaccacactggccaacgtgggctacacagccacctacgacttcaagatggccgacctgcagcaggtggcacccgaggccaccgtgcgccgcttcctgcagggccgccgctgcgagcacagcaccgactgcacctacgggcgcgactgcagggccccgtgtgacaggctcatgaggcagtgcaagggcgacctcatccagcccaacctggccaaggtgtgcgcactgctacggggctacctgctgcctggcgcgcccgccgacctccgcgaggagctgggcacacagctgcgcacctgtaccacgctgagcgggctggccagccaggtggaggcccatcactcgctggtgctcagccacctcaagactctgctctggaagaagatctccaacaccaagtactcttgatggggcagtgaggggcctggccacccttcctggagctggccaggtgccagggtccagccctccctcaaggaatcctgtcagaagatgtgaaatgcaactgtgttgcaaaatcactcccctaccgtcagggctctggattccagcaccacagacatgagaccccagctcggagcaaaggcggacatggacatcccggcaggagagtcctccaagggggtttgttactctgaagaacgtaatgtcaataaacagcttttatgtaatgcccagggctgagcaccctgagcccccatcgatgctgtgtgtgggacccttcgccccgctgtggatcgtcggagagaggctgg

SEQ ID NO: 1422 - protein, 138 aa, Homo sapiens
  VARIANT (56): Wherein Xaa may be any one of Arg or Gly or Trp
ARLQTAGLLWGPLPHRGRAAWRLARGRPPTPVAPTAAACPAGCSPAVAGACVALAXPRSPSACWSSWRSSSTALTGLSTCVRPHWPTWATQPPTTSRWPTCSRWHPRPPCAASCRAAAASTAPTAPTGATAGPRVTGS

SEQ ID NO: 1423 - DNA, 429 bp, Homo sapiens
  misc_feature (386): Wherein n is one of a or t or c or g
agatcttcacttcaagggaattctggattttgatttttttcccttgccttatgtctctttattcatgcttataagaggtgtgaaaagttgggggaatcctacctggtatggttaagagaatagcaagcaatttagacaatgccatgaaggccactgcagggtaccagaattgtcaccccaaaatatgtcactttggcataagaattattttgagctgaaggaaactgagaaatagcaggcacaggaagaattctctgctctccccttttttgcttaaaagcaggacttatatttccctttgtaaaactgacataaatttctatttgtaaaggtgttccccgtattaggaagagaaggatgactctcttcataacaaaccttactanacaacccttatttaccatacaagttctagtcaccttcccacag

SEQ ID NO: 1424 - protein, 90 aa, Homo sapiens
  VARIANT (7): Wherein Xaa may be any one of Ile or Leu or Val
MVNKGCXVRFVMKRVILLFLIRGTPLQIEIYVSFTKGNISPAFKQKRGEQRILPVPAISQFPSAQNNSYAKVTYFGVTILVPCSGLHGIV

SEQ ID NO: 1425 - DNA, 402 bp, Homo sapiens
agatctgactccaagatcagtgatttgtcagtttggttttctccgctcctttaagcaggaacccaggagaaaattcaggagacggtgtgaaaagggaagcagtgtctacaccccgggagtctgctcctatcaggggggtgtcctggtccacagtggcagctcctcagtagggacggcaggaatgctcccagccagattcctgagccctcctcgtgcctgtgctgggacaagactgttcctagagcggcagcccttatctgctgatgtgtgctctgtggggatgcctggtcccacatctcagggccagacttgctctcctaagtccccaaacatcaaggggctccctgaaaagcacagctttttcccagggcaggcctgcggtcattcctccacagccctagg

SEQ ID NO: 1426 - protein, 73 aa, Homo sapiens
MLPARFLSPPRACAGTRLFLERQPLSADVCSVGMPGPTSQGQTCSPKSPNIKGLPEKHSFFPGQACGHSSTAL

SEQ ID NO: 1427 - DNA, 380 bp, Homo sapiens
gggcccagttaagggctccccctccactcctgcgccttcaaggtcggcctgcacctcccctgctctgtgccagtgcaggccaggcagggggctgaggccgaggcctggccattgccctcctggtcacgatctggtgaaggatttgagtccagaagccaaacgtctacagtcgtgtggtgcggacactcaggatggactgcccaggccatggggggctctgaatgaagaggaacctgcgggggcgaggtgggctgcgcgtctgcaagaaagtgcatgagttgagtgctgctgcagagggaagctggggtccaccgctggtgagcggggaggggacgggacacagaaccggccgctgcccaccccgagacggaggcgcagac

SEQ ID NO: 1428 - protein, 88 aa, Homo sapiens [sequence omitted]

SEQ ID NO: 1429 - DNA, 397 bp, Homo sapiens
  misc_feature (389): Wherein n is one of a or t or c or g
cctagggatggaacctgggagcttggggagaagcgagtgtgggcagggacagtgcatggagaagccaggaaacctgagctgcaagggaggtggaaaggggccatgaaaggccctggtgcaaagtgtgcagcagcagcaaggcagggggaaggggctgcagggagggccaagggtagcaggaagatgggaccaaaactggagagaaggagagagacagtgggacatagaggatgacaggaaggggtggagatgggaggagagaggcacagacggagaagataaaaaaccagacagacagacatgtacacacgtgataagacagagagaccaaggggcggagggaaaatgagtccaggcggaagggaacacctctgaagaagatcactgcncaaaccct

SEQ ID NO: 1430 - protein, 100 aa, Homo sapiens
MSVCLVFYLLRLCLSPPISTPSCHPLCPTVSLLLSSFGPIFLLPLALPAAPSPCLAAAAHFAPGPFMAPFHLPCSSGFLASPCTVPAHTRFSPSSQVPSL

SEQ ID NO: 1431 - DNA, 366 bp, Homo sapiens
  misc_feature (1)..(91): Wherein n is one of a or t or c or g
nnaggcagctcgcaaccatggatcgctggtgacacagccctcaacaaananatcacngagtccgtcagcgcccagatccggaaanacttgnccaagagcaaatggagacaagcatttaatgccacggccgtcgtgagacatatgagaaaactacacctcggcagcagcctggacagttcaaatgcaagtgtttcgagcagcctcagtttggccagccaaaaagactgtgcgtatgtagcaaaaccagaatccctcagctgacactgaagacgagcctggggtggagaggagggagccggcatctgccgagcacctcctgtttgccaggcgctttctatactaatccccatgtcatgcgaccctagg

SEQ ID NO: 1432 - protein, 86 aa, Homo sapiens
  VARIANT (1): Wherein Xaa may be any one of Ala or Arg or Gln or Glu or Gly or Ile or Leu or Lys or Pro or Ser or Thr or Val
  VARIANT (17): Wherein Xaa may be any one of Asn or Asp or Gln or Glu or His or Lys or Tyr
  VARIANT (29): Wherein Xaa may be any one of Asn or Asp or His or Tyr
  VARIANT (31): Wherein Xaa may be any one of Ala or Pro or Ser or Thr
XGSSQPWIAGDTALNKXITESVSAQIRKXLXKSKWRQAFNATAVVRHMRKLHLGSSLDSSNASVSSSLSLASQKDCAYVAKPESLS

SEQ ID NO: 1433 - DNA, 424 bp, Homo sapiens
aagtgccacccagagactggggcctgtgtatgtcccccagggcacagtggtgcacgttgcaggattggaatccaggagccctttactgtgatgccgaccactccagtagcgtataactcgctgggtgcagtgattggcattgcagtgctggggtcccttgtggtagccctggtggcactgttcattggctatcggcactggcaaaaaggcaaggagcaccaccacctggctgtggcttacagcagcgggcgcctggacggctccgagtatgtcatgccagatgtccctccgagctacagtcactactactccaaccccaactaccacaccctgtcgcagtgctccccaaaccccccaccccctaacaaggttccaggcccgctctttgccagcctgcagaaccctgagcggccaggtggggccc

SEQ ID NO: 1434 - protein, 141 aa, Homo sapiens
KCHPETGACVCPPGHSGARCRIGIQEPFTVMPTTPVAYNSLGAVIGIAVLGSLVVALVALFIGYRHWQKGKEHHHLAVAYSSGRLDGSEYVMPDVPPSYSHYYSNPNYHTLSQCSPNPPPPNKVPGPLFASLQNPERPGGA

SEQ ID NO: 1435 - DNA, 384 bp, Homo sapiens
  misc_feature (7)..(370): Wherein any n is one of a or t or c or g
cctaggnggtaccctggcctgnggccagagcaggtgtgttgggagggggttgcatggtggtactggactccaggatccagagagggtcttcaagggacacctgactccccaggaattttgagggagttgtttgaggaacaagatctctacagggtaacattgtgaacctatggcctttggagcattgctttgtaccatgtgcccctcacttgtctgccctcctccacccaccctttgccagagtttggggtttccaccctacttccataggctcagccctgagcttgtagggtgagatgtagcccgtntccttcatccttgtccggctgtcttggctggatgntggangtggtnntggatcccggagtgnggtacgggtctgtc

SEQ ID NO: 1436 - protein, 66 aa, Homo sapiens
MVQSNAPKAIGSQCYPVEILFLKQLPQNSWGVRCPLKTLSGSWSPVPPCNPLPTHLLWPQARVPPR

SEQ ID NO: 1437 - DNA, 291 bp, Homo sapiens
cctaggtgcgctagtcctcaaactggaacttccgctcctgatattttgtttaaggatggaggcgtggagggaccaggagacccagtggagtaaccctgacccgcacctgcacgatgcccgcggagtgcaaagcactttctcctagcgcgcagagcatatatctgaaagcttctcgcccgtcctccgcccaacacccccgcaggactggcagggtcctcctttttttctccttgtgtaccccccaggttccttgctctaactccttcacttatcagcctgaggattgggccc

SEQ ID NO: 1438 - protein, 59 aa, Homo sapiens
MPAECKALSPSAQSIYLKASRPSSAQHPRRTGRVLLFFSLCTPQVPCSNSFTYQPEDWA

SEQ ID NO: 1439 - DNA, 277 bp, Homo sapiens
  misc_feature (183): Wherein n is one of a or t or c or g
gggcccgcggcagatggaggtctcccttctcctccttcctgcagctctttttctatcactctttctttctcctctgccgattctccccggcacggccccaggacgcgaatcgccattccctggggcagaaagcaaagcctcccccgcctctgtcaatccaattcatggcaaaggatggaaaanaaaatggacaaggggctgagaaataagaagttgctaagtcccgtcggagagagagccagaccgagagactagcggcagccgcagaagggaggga

SEQ ID NO: 1440 - protein, 62 aa, Homo sapiens
  VARIANT (57): Wherein Xaa may be any one of Asn or Lys
MEVSLLLLPAALFLSLFLSPLPILPGTAPGRESPFPGAESKASPASVNPIHGKGWKXKWTRG

SEQ ID NO: 1441 - DNA, 553 bp, Homo sapiens
  misc_feature (466)..(530): Wherein any n is one of a or t or c or g
gggcccccaggtgtttccaaaggggagcgccgattgccaggtgcagaatccacacagctacccaccgtgggaggtggagggacctgggcaaatccccaggaaatgtgttagaatttccccaaatactgcaaaagcgaaaaagtgctcgcgcttatcatgtgaaagactagtagtgtccaggagctgacacagcacagggggactctgaccactgcaggaacagcgagctgtgtcaggacggaaatgagcaagcctgcgtctccggcgcacctggggaaagagtagtgcagggtgcacatcagggctgtgactcactccgcagagcacacttgagtccccagggtaaggatgaacggacagccttcccacgtcatgtagtgtggccggtggggctggggggagtgtagtgctcttggaggcgggctaccagggatgtggcagacccacttttcaggtcccattcatntcctctctgggatacgtttcatcataatcactcggtacgcacgattcttcccaacagcctgaanacagcaggctctgcatccttttc

SEQ ID NO: 1442 - protein, 63 aa, Homo sapiens
MCTLHYSFPRCAGDAGLLISVLTQLAVPAVVRVPLCCVSSWTLLVFHMISASTFSLLQYLGKF

SEQ ID NO: 1443 - DNA, 345 bp, Homo sapiens
  misc_feature (1): Wherein n is one of a or t or c or g
nggatcctattgatcatcgcttcagttattgggatcattgtctataggctctcggtgttcattgtattttctgcaaaacttcccaagaacattaatggaacagacccaatccagaaatacctgactccacagacagccacgtccatcacggcctccatcatcagctttataattatcatgattctgaacaccatatatgaaaaagtggcaattatgattactaacttcgaactcccaaagacccagactgattatgagaacagcctcaccatgaagatgttcttattccagtttgtcaactactactcttcatgcttctacatagcattctttaagggcaaattt

SEQ ID NO: 1444 - protein, 115 aa, Homo sapiens
  VARIANT (1): Wherein Xaa may be any one of Arg or Gly or Trp
XILLIIASVIGIIVYRLSVFIVFSAKLPKNINGTDPIQKYLTPQTATSITASIISFIIIMILNTIYEKVAIMITNFELPKTQTDYENSLTMKMFLFQFVNYYSSCFYIAFFKGKF

SEQ ID NO: 1445 - DNA, 597 bp, Homo sapiens
tgtacacagcataaacctaacttctgtatgcactgggaaatcaaaaaatgtgtgtgcctcactttatcgtgatatttattttattgccgaagcccggaacggaacccacaatatcaccaaggtgtgcctgtattagttaactaatccagtaatttatgaaaaagatcatggctaaattgggtttattccaggaatgcagggactttttaacatgatattaacaaatcaaaaggggaaagccacaagttcactgtaactggcaacatccaatcatgattgtgattaaaaacaaaaaccagaacctcctggcaaatgcgaaatggaggggaattttttcaaattgataaaaaacattaaaaaaaaaaaaaacccacaacaaccacttcacttagcagtgtaacaaggaaggtttccctttggtgaggaccctctgtcgccaacatgccttcatcacctcagtcccatgcttgttggagatgccagcacaggacgacaagaaaagtcaatagaaatctaaggaatttgcatttccccagctgtcccagaaacactgagatagttgctgtttcaacctggactctaatccaggttcctagg

SEQ ID NO: 1446 - protein, 52 aa, Homo sapiens
MPSSPQSHACWRCQHRTTRKVNRNLRNLHFPSCPRNTEIVAVSTWTLIQVPR

SEQ ID NO: 1447 - DNA, 376 bp, Homo sapiens
gaattcctgaggggaaggaacaaactccttttcatctcaatgctcagctgcacctggcataaaacgtgcacctactaaatgtgctgtggaataaacagatgaatgaactcctgatgctccccattgcagaagactgcgaaagcatagcactcatgagagttggcaaaggacttgggcagacctgggcttgaagcccaaggtcactttgaagctatgatgctggaccatgtacttaacccagggcttggcaacttcccttgtgtgaagagtcagacagcagacattttcagctttgtgggccataaggcttctcacatagctattaatactcaactctgtgttatttgtaaaaatagccagagataatgtgtccgga

SEQ ID NO: 1448 - protein, 50 aa, Homo sapiens
MMLDHVLNPGLGNFPCVKSQTADIFSFVGHKASHIAINTQLCVICKNSQR

SEQ ID NO: 1449 - DNA, 313 bp, Homo sapiens
tccggagctagaccgagtgtccaggtgtggctgcatcgtggagctgtccagagttccagagtcagcttgagttttccagcagggcttggtctccgagctagcctggattctggaactgggattggtctccaagctggtctgggtcttaaaatgtgtctgggttccagagtttggcttgttgtcagggctcagctggattctaaagatgtgcttcgtctcagagctggcctgggcttcagagcagggcttggtctcagatcttatctgggttctagagctgggtttggcctcagaggtggcctgagttctataa

SEQ ID NO: 1450 - protein, 104 aa, Homo sapiens
SGARPSVQVWLHRGAVQSSRVSLSFPAGLGLRASLDSGTGIGLQAGLGLKMCLGSRVWLVVRAQLDSKDVLRLRAGLGFRAGLGLRSYLGSRAGFGLRGGLSSI

SEQ ID NO: 1451 - DNA, 280 bp, Homo sapiens
tacaccagcgtggagggctgggactacgtggactcgctctacttctgcttcgtcaccttcagcaccatcggcttcggggacctggtgagcagctagcacgccgcctaccggaaccaggggctctaccgcctgggcaacttcctcttcatcctgctcggcgtatgctgcatttactcgctcttcaacgtcatctccatcctcatcaagcaggtgctcaactggatgctgcgcaagctgagctgccgctgctgcgcgcgctgctgcccggctcctgtcgcga

SEQ ID NO: 1452 - protein, 61 aa, Homo sapiens
HAAYRNQGLYRLGNFLFILLGVCCIYSLFNVISILIKQVLNWMLRKLSCRCCARCCPAPVA

SEQ ID NO: 1453 - DNA, 379 bp, Homo sapiens
cgggctgaaggcatcccggtggagatggtggtgatgggggacgacagcgccttcactgtcctgaagaagccaggccggcgggggctgtgcggcaccgtgcttatacacaaggtggcaggtgctctggctgaggctggtgtggggctggaggagatcgcaaagcaggtgaacgtggtcaccaaggccatgggtaccctgggggtgagcttatcctcctgcagcgtccctggttccaaacccaccttcgagctctcagccgacgaggtggagctgggcctggggatccacggggaagctggtgtgcgccggataaagatggcaaccgccgatgagattgtgaaactcatgctcgaccacatgacaaacaccaccaacgcgt

SEQ ID NO: 1454 - protein, 126 aa, Homo sapiens
RAEGIPVEMVVMGDDSAFTVLKKPGRRGLCGTVLIHKVAGALAEAGVGLEEIAKQVNVVTKAMGTLGVSLSSCSVPGSKPTFELSADEVELGLGIHGEAGVRRIKMATADEIVKLMLDHMTNTTNA

SEQ ID NO: 1455 - DNA, 446 bp, Homo sapiens
acatgttgctcaggctggtctcgaactcctgacctcaagtggtctgcccttaagtgatctgcccacttcggcctctcaaagtgctggattacttacaggcatgagccaccacgcccagccaagaaacaatatgttctttctaagcatggtgagcagatgaggggatctgtcttgtttaagctggggataaagatgtagaagacagttcctgccttggagtccttcaccactgagtagtgctggagagccacatgtgaacattacatgtgaataggagttaagcatagtgggccatgagacaacagcaggagacacagcctggtctggtcggtcagagaaagtgctttgtagatgacacctcagctaagtctaaatctcaaagtttgagtcaaagtgaggcaagtgaagagattaagaaaggcagtgggagtggatgtttctgatca

SEQ ID NO: 1456 - protein, 69 aa, Homo sapiens
MLNSYSHVMFTCGSPALLSGEGLQGRNCLLHLYPQLKQDRSPHLLTMLRKNILFLGWAWWLMPVSNPAL

SEQ ID NO: 1457 - DNA, 376 bp, Homo sapiens
acgcgtgagctccaggctcccctggttggaaggtgccagggagtgaggcgggtgagcaggcatcaggccaggggtttgtggtttgcttttcaagtcaggctgctgctgggagaaggaacgcttgcggtctcgccagctgctctgcaattgtggcggcagccagcagagataggaggcggtgggcctgccccgctccagcctggactttccacttggagggcctgacttctccgcttgacccgagacatgcagggggctgcggctgggccacggtctctgcagctggggcctttctctctacggatcctcttgcgggagcaatttggtatctgctctgcgaggtttccttccagaaagaagtgaggacttcagatct

SEQ ID NO: 1458 - protein, 52 aa, Homo sapiens
MSRVKRRSQALQVESPGWSGAGPPPPISAGCRHNCRAAGETASVPSPSSSLT

SEQ ID NO: 1459 - DNA, 380 bp, Homo sapiens
  misc_feature (1)..(380): Wherein any n is one of a or t or c or g
naatcaatactaaactaaaactttgcttttatgagataacatgcaattgtgagacacatttaggagtttccacttaggcaacttgagataaactgaatataatacattcaaacagaacattaaatgagagagaaataatatagaaatagtaattagagcttcgtcaagttaatattagagatgcaggcttttaaactgaagtggatctaacatattttagatatttaagaaatgttccccagtgggttgaccacatttcattgcttaaggtaatgcagagcagggtatgaacaagaaagcctaatgtatgatttccaacgagtgaggcaggaccttgtacatataatgctgtgtccattataataatgatgaacaaagan

SEQ ID NO: 1460 - protein, 55 aa, Homo sapiens
MDTALYVQGPASLVGNHTLGFLVHTLLCITLSNEMWSTHWGTFLKYLKYVRSTSV

SEQ ID NO: 1461 - DNA, 387 bp, Homo sapiens
  misc_feature (1)..(2): Wherein n is one of a or t or c or g
nntgatcaattttgcaaaaaaaaaactattctaaatatttatgtagccaccaccagagcacccagatatataaagcaaatattagacctgaggagagtgatagactccaaaacaataaaagctgcagacttcaacacctcattgtcagcactggacagatcatctagacagaaaatcaacaaaaagactttagatttaaactgcactttagaccaaatagacctaaaagacatctaaagaacattttatccaacagccgcaggacatacattcttctcatcagcacatggcacattcttcaggataggctatgtgttaggccacaaaacaagtctcaatacatttttaaaaattgaaattataccaagaatattctcagaacacaat

SEQ ID NO: 1462 - protein, 78 aa, Homo sapiens
  VARIANT (1): Wherein Xaa may be any one of Ala or Arg or Asn or Asp or Cys or Gly or His or Ile or Leu or Phe or Pro or Ser or Thr or Tyr or Val
XDQFCKKKTILNIYVATTRAPRYIKQILDLRRVIDSKTIKAADFNTSLSALDRSSRQKINKKTLDLNCTLDQIDLKDI

SEQ ID NO: 1463 - DNA, 292 bp, Homo sapiens
tcgcgaacccccagcaccatgctcccggctacgtggcccagcagggcaccgacgagattcaatggcacttcggcctcccactcgacctggccgcacccagcggcccagttactatactcagcgagcccaggtttccgcgccggtcaccgagggctgtgcaaataccaggctcgcggggtggtgagcatcaagtgacagaagcaaagcgctgagcactgggcacgagcgtcttagggctcgagatgggttttactccagaaaaacccagcctgtcccaggctcctcgtggcca

SEQ ID NO: 1464 - protein, 58 aa, Homo sapiens
MLPATWPSRAPTRFNGTSASHSTWPHPAAQLLYSASPGFRAGHRGLCKYQARGVVSIK

SEQ ID NO: 1465 - DNA, 249 bp, Homo sapiens
  misc_feature (1)..(70): Wherein any n is one of a or t or c or g
nngggccccagggttctcaggggtcgcttctctgccatcgctgtgaaggcttcgagccctcctaggcccnctgctactcaacttctgacctgcagagcgccaggactcccgccgccgctaccccaggcggcctccgcgtccgcatcctccagcgtctctcaggccgcgggtcctagtccgaccgggccctgcgcgggaagtcgcagtgagcaccaagcccggagcaaccctcctagctgccgttcgcga

SEQ ID NO: 1466 - protein, 83 aa, Homo sapiens
  VARIANT (1): Wherein Xaa may be any one of Ala or Arg or Gln or Glu or Gly or Leu or Lys or Met or Pro or Ser or Thr or Trp or Val
  VARIANT (24): Wherein Xaa may be any one of Ala or Pro or Ser or Thr
XGPRVLRGRFSAIAVKASSPPRPXATQLLTCRAPGLPPPLPQAASASASSSVSQAAGPSPTGPCAGSRSEHQARSNPPSCRSR

SEQ ID NO: 1467 - DNA, 297 bp, Homo sapiens
cggccgccttgtgtgtgccaggagagtggcagtgccatgctgctgggagctgccccggagagcagcccaggaccccggcggggccgcccctcgtcctctctcgtccccgaggggtcgggcaggaaggaaaatcaaactttattcccctctgtgacttcctctgtgtgtgtgcatggggaaccggctccctcgagatggatgctgcattgcttcaggaggcaagcttcatcctcttgggtccttaaaggtgcttttgggggtcctttcgagggctactgtataagcgtgttcacgcgt

SEQ ID NO: 1468 - protein, 87 aa, Homo sapiens
MLLGAAPESSPGPRRGRPSSSLVPEGSGRKENQTLFPSVTSSVCVHGEPAPSRWMLHCFRRQASSSWVLKGAFGGPFEGYCISVFTR

SEQ ID NO: 1469 - DNA, 336 bp, Homo sapiens
tgtacagccccaggatgagggcagcacgagctgagagatcagatgtccactggggtggtagtagtgtgtgctcattggactggttttgtgggatgatttgggatacaatcctggctactactaagcctttccaagcttggttctgcatccttgccagattttgtggcttttgtgagctatccaaaaccttcataatttgcttttctgtttcaattattcaaagtccatttctgttgcttgcaactagcaaccctggctgatgcagcatgacagccattcaaatagttggagatagctactgtatcttcctttgtcagttgttcagtcttctccgga

SEQ ID NO: 1470 - protein, 81 aa, Homo sapiens
MRAARAERSDVHWGGSSVCSLDWFCGMIWDTILATTKPFQAWFCILARFCGFCELSKTFIICFSVSIIQSPFLLLATSNPG

SEQ ID NO: 1471 - DNA, 234 bp, Homo sapiens
acgcgtggaaggatgctgacactgacccagtacagggctaggaccgggcgggaggtgtcagggggcgcacagggacggctgccatttactatctcccacgtaccccagatttcccgttacttcattcagcccttacaacaaccttgcaaagcagatattattatcccctcggcttatagatgagcaacgtggtggtcgagagttaatgggcttgcccacaatcacacagctagc

SEQ ID NO: 1472 - protein, 56 aa, Homo sapiens
MLTLTQYRARTGREVSGGAQGRLPFTISHVPQISRYFIQPLQQPCKADIIIPSAYR

SEQ ID NO: 1473 - DNA, 393 bp, Homo sapiens
tccggagccccctaaaatcgcacccatgtttcgaaagaaggccagggtcattacccagagccctgggaagtatgtgctcccacctcccaaattaaatatcgaaatgccagattagatgccacttccggggacagagcttaagtggactgggacgcactctctccgccttcctctgccccctcgttcaccccgcagaccagaaccagtactggagctgggtctccaggtacgtccatctcatgccttgtttgcatccagcgcctatcagccactcaccacgacgggacgcggaagtggcaggtgacgggggtgtgtgccagcagatgcggatgccaggaagagtgtgagaacaggggtgggattaccgtctgtctgggaggggctccaggtacc

SEQ ID NO: 1474 - protein, 62 aa, Homo sapiens [sequence omitted]

SEQ ID NO: 1475 - DNA, 472 bp, Homo sapiens
aggtaagtaagctgttggtgagcacacagctaatcattggcagagccaagattaggactctagtctttgaagtgtcagaggccctgtgtttagctcctacactccattgcttctagaaacagacactggcatcacttctaaccctgttcccttgagctgctgacgacttaggctctccatcactcccctagagaggtgctgggggtgcacaggatgtgttttgcaggcttatgggtgctaaacctcatcctgcccgctattatttattcagcatctgcccgacccatcaaccagtctgtcaacagcagtgacagtctggcctttcttcttttattccagcatcaggctgggcacatcagtggtgtcagacaaacacgtgtgaactgtggatggagccaggaggctcaagactgcctgatggccttgcctgctctcctgctcccccatgaggctgtcaggggtaggatggatt

SEQ ID NO: 1476 - protein, 86 aa, Homo sapiens
MCFAGLWVLNLILPAIIYSASARPINQSVNSSDSLAFLLLFQHQAGHISGVRQTRVNCGWSQEAQDCLMALPALLLPHEAVRGRMD

SEQ ID NO: 1477 - DNA, 447 bp, Homo sapiens
actagtaaggcggtcaccattaaaatagaccagataatgcatgaagatttacagttgtattgcaaaacggaaaagataaaactgtcctttgaggagagtactcgttttctgggtttttgttattttttagtggtaacacaagcctatagggcatttatagccacctattatactgtttccataagcctggctaccttttagggaagctattttttctctttcatttttactgtcacagcacatacacacacacctttttgttttaaaggattaagtactgtttgaagatcagtggtaacagaaaatttgggagggagaagaagaaattaagacatgacttgttagaaaattaagacttcagtttctagaattatcttttcatcaagatttggtagacattgagtttaaatggaaaggaaattatttaagcctgtgtatgttagatct

SEQ ID NO: 1478 - protein, 54 aa, Homo sapiens [sequence omitted]

SEQ ID NO: 1479 - DNA, 353 bp, Homo sapiens
  misc_feature (1)..(2): Wherein any n is one of a or t or c or g
nngcgcgcaccgcgccccgagaaccaatcagcagccgcgttaggtaaccatgtctgagtctggacacaatcagcctggactctatgggatagagcggcggcgacggtggaaggagcctggctctggtggcccccagaatctctctgggcctggtggtcgggagagggactacattgcaccatgggaaagagagagaagggatgccagcgaagagacaagcacttccgtcatgcagaaaacccccatcatcctctcaaaacctccagcagagcggtcaaaacagccaccacctccaacagcccctgctgccccgcctgctccagcccctctggagaagcccatcgttctcatga

SEQ ID NO: 1480 - protein, 57 aa, Homo sapiens
MGKREKGCQRRDKHFRHAENPHHPLKTSSRAVKTATTSNSPCCPACSSPSGEAHRSH

SEQ ID NO: 1481 - DNA, 651 bp, Homo sapiens
  misc_feature (1)..(2): Wherein any n is one of a or t or c or g
nngacaaactagagaacatgttgagacaaggtgttcagggaagagttcttttgagaaggtgatattaaagcgagtttggggaagaacgtcccaggccttgcgctcagggtcgtcaactctttgatttctcttccttttgaagcagggcagggaggtcatcaaacaacagaaggacaattataactgctggtatggcaaagccaggactctgaattcaaactctgctccattctcaggaatcccgtctgttaagcaggttctggggaagcgatgtgagtcatgaaatcacaggtcggaggaggcatcgagaatatggtcagttctcaactttcagggaaatccatagctgaggaatgaaggacaacgggcttctcgtgctctcactaggaagactggttcaccggaggctggaacacttgtctaggtggcacgttccttaaaagcgaaaggaccaggagtttcttcctgcctcgtctcttccggatccctcctgcaccgcccacagcttcttccggcaggccgctgcctatttttagaaacttatttctgccttcggggagtcccgggagcccgagtaactctaggccccctccgccgctcctttctcccactgacccgccgccccggtccccgccccagcctccgcgccgg

SEQ ID NO: 1482 - protein, 88 aa, Homo sapiens
EDWFTGGWNTCLGGTFLKSERTRSFFLPRLFRIPPAPPTASSGRPLPIFRNLFLPSGSPGSPSNSRPPPPLLSPTDPPPRSPPQPPRR

SEQ ID NO: 1483 - DNA, 569 bp, Homo sapiens
aacaggagaaaccaagagcgtcatggaggtttgtttccagatgagagaaaccgacaatgttaaatgtccaccaggaaccacaaagtcccatcagacaaggaggtgctgccaaggcctggggggggccaccagctctgagcccttcctggggacccctggggctctgggctagcagatgtcagatagaggcttgggggactgggggacatgctagaccacctcactaagggggcttggactgaccctgcagaggcgaacgctagtgactcactgacttctccaggcccggactataaatagccacgggcccgggtaggggcagggagttggggcttttctaaaaacagtcctgcccaggcccaacagctggggcccctgccagtcacacggctcagcccgaattagaacacctccaccccttaccccccacagtgggcctgtccccaggtgtgggcagcacgggagccaccgagcttggggccatccatctgggccctgctgtctcgatgtgtgaccttgggcaagaacgagggtgcatgggtgtgtccacctgtgggttccactctttg

SEQ ID NO: 1484 - protein, 56 aa, Homo sapiens
MLNVHQEPQSPIRQGGAAKAWGGPPALSPSWGPLGLWASRCQIEAWGTGGHARPPH

SEQ ID NO: 1485 - DNA, 615 bp, Homo sapiens
tttttttttttttttttcttatagcagacaaaagggatttccctcctttattaagttcttattttaggacataccaattcgtattcctcgtaagaggcatagcattaaaaaaacaaagatgagtttccaggctcccatttccaaaattcttatcagtctccctagatgattatagcaaaggaaaaagtaacatgtacaatacgtcatcacatttcccaattgagttcttttccaaatggtaattttataaattaaagtaactaagtaaatccatgatcagcaaacagttgctaggtgatgaagaatttaaacaaagcatgtaaataatttggcaactcaaccatgtaactcaaacctagtaacaggtaaaaaactaaatattctaagttataatgtgggagtatatgtatacttatgtatatgtgtatacacacattatacatgcatgggttgttttggggttttttttgtcatctctgccaagatcagccaagaggaagaacggtaattcgtttaaaagttaggaactgggcatacctttaaaatttcaacagcatatttcctttatattgtattacagtaactgctctataaaactgttggctgaagcctagg

SEQ ID NO: 1486 - protein, 50 aa, Homo sapiens
MYNVCIHIYISIHILPHYNLEYLVFYLLLGLSYMVELPNYLHALFKFFIT

SEQ ID NO: 1487 - DNA, 587 bp, Homo sapiens
  misc_feature (1)..(2): Wherein any n is one of a or t or c or g
nnggcggcgccaggtgcgttcactctgcccggctccagccagcgtccgccgccgccgtagctgccccaggctccccgccccgctgccgagatggcgacgcgctcctgtcgggagaaggctcagaagctgaacgagcagcaccagctcatcctatccaagcttctgagggaggaggacaacaagtactgcgccgactgcgaggccaaaggtcctcgatgggcttcctggaatattggtgtgtttatttgcatcagatgtgctggaattcatagaaatcttggggttcatatatccagggtcaaatcagtcaacctagaccaatggacagcagaacagatacagtgcatgcaagatatgggaaatactaaagcaagactactctatgaagccaatcttccagagaactttcgaagaccacagacagatcaagcagtggaatttttcatcagagataaatatgaaaagaagaaatactacgataaaaatgccatagctattacaaatatttcctcctctgatgctcctcttcagcctttggtatcctctccttctctgcaagctgctgttgacaaaaataaattggaaaa

SEQ ID NO: 1488 - protein, 165 aa, Homo sapiens
MATRSCREKAQKLNEQHQLILSKLLREEDNKYCADCEAKGPRWASWNIGVFICIRCAGIHRNLGVHISRVKSVNLDQWTAEQIQCMQDMGNTKARLLYEANLPENFRRPQTDQAVEFFIRDKYEKKKYYDKNAIAITNISSSDAPLQPLVSSPSLQAAVDKNKLE

SEQ ID NO: 1489 - DNA, 611 bp, Homo sapiens
agcggccgctgctctccggcaccagccacttcatgaccatgtccacgcagctcttgcggtaggagctccagacactgccgctggtctgccctttgacctcagtcaggtcgcctacactgactgtctcgaagatccctgtgttgaggtcccatgccaccttgaggctggtgtgataggtctttggtcggagctggccctcctcagtgggggacgggaaggccaggagcagcaggccaatgttgatgaggacctggttggtttctgggcagacctccagaatgacgatgtcatagtcgctgaaagaacagaactgatggccccaggtagcgtcgtggcggatgacctcattgataacatattcgaagtctagtgtgagctgctccactgtcaggtactggccctggacagcagtccgctcccgcatgggccgcaggttgcggccacgaagatcagtcaccacgaagggcagggagatcttgtcgtcctccaactcatcctccggctccgtcccctctccggactccagcacatagtacagcttggtgtagttgacatagccaggctcggaggcaggtgcctccgaggcaggggggctgtcccggcctcgtgcc

SEQ ID NO: 1490 - protein, 141 aa, Homo sapiens
MRERTAVQGQYLTVEQLTLDFEYVINEVIRHDATWGHQFCSFSDYDIVILEVCPETNQVLINIGLLLLAFPSPTEEGQLRPKTYHTSLKVAWDLNTGIFETVSVGDLTEVKGQTSGSVWSSYRKSCVDMVMKWLVPESSGR

SEQ ID NO: 1491 - DNA, 1154 bp, Homo sapiens
ccaagttaaaattgatgcttagaactatgtttccaacctagcttatgatagaaaaccaagaaattatgagatcacacaaatcttcaaagaaaatcagggtagatctagatgtcatcaagaaagaaactgttaaatatccattgagaaacacacaagcccccaagaaaattacagtctatgccacaccaaaagaaaatacctgtatttttagtttttaagtgaataatagcgcaaaaatcacattacaactgtgctaataaggaatggagagatcagtgtccagcaaaaataattaaaaagtcagttcaataagctgagagggtagcatcctaaatgaagttgttgttgttgttgttttaacagttttaacgtttgtgcaacaaataattgaacagggtttgtttgttttttttctttttagaggatccaaaggtataggtaagaatgacaaactcttaatcaaacaaggaaggggcaatttcacagaatattgccactgttctctgaaaacaggaagagcacagacgtgtagagaagtaaaaccaaatcaaaccgcatgcacagggcttcactgatcatgactggagtgcatgttacattctctctaaaagcccctccggtcttcatttctgacatcaggttctaaagtcagaacactacggttccattttgcccttagacacaccggtatgaagttccactgggggaacagtgccaagcattcaacaccctgactgataagcaatatattcagaagtcaatccaagtcttcaagctgatccccttcctggtggcccagaccatggcaactcttctgtgcatttgttgcctcctttaccctttgggactgggggaggaatgagatgggtgagagggcagtgagggcatggagattggaaagaaaaaaaaaatgtgtactttaaaattctgaaataaaaggtagtgtctaaaaactcaacaaccttcttggaagatttcatgcatttcttaaaatttcccctgtcactgcacccccagcaaacatgctggtggtgaaggtccgggaattcacacaaagggatgcagttaccatatgccctggagaggtgaactttcacccacttaaacagaaaagaatagcccggagttcctctcagagtcatgggctaaccctc

SEQ ID NO: 1492 - protein, 123 aa, Homo sapiens
MTLRGTPGYSFLFKWVKVHLSRAYGNCIPLCEFPDLHHQHVCWGCSDRGNFKKCMKSSKKVVEFLDTTFYFRILKYTFFFSFQSPCPHCPLTHLIPPPVPKGKGGNKCTEELPWSGPPGRGSA

SEQ ID NO: 1493 - DNA, 980 bp, Homo sapiens
ctaagtaataaaacacatagcatgattctctctctctctctctctctctctctgcccaccccctgctagtttccaggagaatacttctctaaaattcatttttctctattttggaataaattatctttatacagtaattcaaacactgatttccattaacctttggccctgagttttcttctaacatagaagagttcattttgagaggcactcagttaccattcaatctgtgctgtaagtatgggactttgtacaaatgccctttttgagggccaaaaatttcaatacactttgttctactttgtgaaccaggtctggatctgcacagagaaagtaatgctgagctgtccaaagagtccgctcaggtctccctcctaaccctcctctgccttcccctagtttgcttatcctcacgtctgacactgaggagtgcatagtcttcaactgaaatggcactacagttagttctcattggaaacaaacaagtgtatttctggaacctgctcgtctaaaatagtcaatgcctttgtaaagactcagcatattcaatatctattgtatggtagctagctatatacatagattgactatttttagtcctggtttgtgtattgttgagctatagtagtttgctttatccatttgtgggattaaacaatactgtttaatggttgtaaacttttataaaatctctttgggttttttgtttgacccaaacataatgtaagtcttaatgacaaaatacacaaagttaaccagaggtgagtgaaaatatagcccttccccagttttgtctgcccctataatgcacgtgcattgctttgtaatatgctctcgctagcatgaatgtgctatgactacttcatgaggttttgtttcacctataattgtgatggaaaatgctgtattgctgacaacaatgaactgtaaccacagttatttactgcataaactatttgtgtactaaccaaaaaaaaaaa

SEQ ID NO: 1494 - protein, 70 aa, Homo sapiens
MHSSVSDVRISKLGEGRGGLGGRPERTLWTAQHYFLCADPDLVHKVEQSVLKFLALKKGICTKSHTYSTD

SEQ ID NO: 1495 - DNA, 819 bp, Homo sapiens
ttatctccacactctcagtttaattgttctccaatccatccccaaaaccaacccaatggtttgtttccagatgtatcagatggcagtccaatgtggggccatcagacagctactaccatttcaaatcaaaatggatctccttttcaccaacaaggacattcacactctatgcatcaaaataaaagctttgtggcacaccatgactttgccttatttcaggccaatgaacaacaaacacagtgtacttcactacgctcacaacaaaacagaaataatctcaacccagggcagaattctcttagccagtctaaaaattttatgaatgtttctggtccacatagggtcaatgttaaccacccaccacagatgactaatgcatctaattcacaacagtctatttcaatgcagcaattttctcaaacgtcaaatccttcagcacacttccacaagtgtagcagtcatcaagaaggaaattttaatggaccttccccaaatatgacttcttgttctgtcagtaattcacagcaattttcttcacattattccttttccagtaatcatatatcaccaaacagtctacttcagtcctctgcagttcttgcatctaatcatacaaatcagactttatctgattttactggaagtaattccttttcacctcatagaggaatcaagcaagaatctactcagcatatcctaaaccccaatacatcattgaattcaaataatttccaaatattgcattcatcacatcctcagggtaattatagcaattcaaaattatctcctgtgcacatgaacttcccagatcctgttgac

SEQ ID NO: 1496 - protein, 273 aa, Homo sapiens
LSPHSQFNCSPIHPQNQPNGLFPDVSDGSPMWGHQTATTISNQNGSPFHQQGHSHSMHQNKSFVAHHDFALFQANEQQTQCTSLRSQQNRNNLNPGQNSLSQSKNFMNVSGPHRVNVNHPPQMTNASNSQQSISMQQFSQTSNPSAHFHKCSSHQEGNFNGPSPNMTSCSVSNSQQFSSHYSFSSNHISPNSLLQSSAVLASNHTNQTLSDFTGSNSFSPHRGIKQESTQHILNPNTSLNSNNFQILHSSHPQGNYSNSKLSPVHMNFPDPVD

SEQ ID NO: 1497 - DNA, 807 bp, Homo sapiens
ctgaagaggaggaatatttccaggagcagaactccctgcacgacaggagggaccgaggccctcctcgggacttgtcactgcctgtctcctccctctccagcagcgactggattctggagtccatctagagggtcttgggagggatgtgactgttgggaagcccttcctactggacacgctgtcatcatttgctgcttctcttgcaagaaagcacctccgttgtggacggtcctcgggcacaggggatgagcgctaccagtttcatttgtaggcagggagttctccgcggatgcatggtggcagtctgctttgatggcagcagtttctgcttaggtgacctagaggtcctcagcagtatcctccacacctatttattgaggtgcacctgctggggattcataatgagaatataacaagaggatctcggtgaaaggccttagtgggtgttttgtgtgaggtggcttgtagctagctacttccttacagatggtagagtattccaatcctctttgtgttagggttcttgcttccagtttgggatgtattaaaaccaccatttcactgcttcccttcctcaatatgctctgcagcttttcttgctgtttaaacctctcgcctcagctttatttatttgtaagctgcattactaactgcccagtgattcggtgaaagctttttactgaaaaagttaacatttctagtcatcccaatcaactggcttttttcaaccaaaattttatatcattctttgtctatcagatacgagaggaaggaagataatacgaagacatgttgaatagtgaaaaa

SEQ ID NO: 1498 - protein, 61 aa, Homo sapiens
MVVLIHPKLEARTLTQRGLEYSTICKEVASYKPPHTKHPLRPFTEILLLYSHYESPAGAPQ

SEQ ID NO: 1499 - DNA, 480 bp, Homo sapiens
ggtatttatcccagacaacaaagccattttattttggttctccttaagctctacctatcggcagagaggatgcattttgagctattttccattatgcaataataatgataaatccaaacatataaatagaattgtaaataatgataaatccaaacatataaataaacagtcccagggactgttctaagcactatataaataaatttacttctttccccaaaaccttgagatataattattcccattttacagataaggaaactgaggctcaaagagatttagtgaattccctgaggtccaacagttgataaatgtttctgaatgctccttcggggagggctgaagattctagctaacacagtgactgggtagtcaagtctgtctcattttagaagtccattttgctgtagatctaaaactattaatatgttgtctaattggttttatcactaattaaagcaatattgttattttccaaaa

SEQ ID NO: 1500 - protein, 64 aa, Homo sapiens
MGIIISQGFGERSKFIYIVLRTVPGTVYLYVWIYHYLQFYLYVWIYHYYCIMENSSKCILSADR

SEQ ID NO: 1501 - DNA, 449 bp, Homo sapiens
gtcatttctgcttagtcttctccaatctgtgacagttcctcagcctttccttgtcttttgtgacattgatacttttcaagagtactagtctactgttttgtagaatgtttctcactttgggttttctatgattatattgaggtaatacatgttgacaggaataggaaatagcacagaagtgatcttgtgcccttcatagtgcatcctaccaggaggtatgtggtattgatttgtcttgttacctgtgataccagccttattacttggttcaggtgaagtctaccagatacctccatgttagatgaagtgctaacctctttccccttgtctgtcctctggctcattcacagcagacagctctctctcagctttgcagggaaagaagccagcagatggcattgactctgcttctctatcccccttctgccaccgtggtagcagagctaccc

SEQ ID NO: 1502 - protein, 70 aa, Homo sapiens
MSQRTDKGKEVSTSSNMEVSGRLHLNQVIRLVSQVTRQINTTYLLVGCTMKGTRSLLCYFLFLSTCITSI

SEQ ID NO: 1503 - DNA, 1559 bp, Homo sapiens
ttttcaagcacaaattttagtaagaccacagttagtaaaaggttacagtctttaaaaaatctacaataaggaacaagtgctgggaaataaataacaaagcataacagcaaatagtgccttgatatattaggttaaatatcttttcatttatctcattaaatccatcttttctctaacttggcaaaggttatagcaaaagatgacatttgtcatgtgagtagctcataaaatgggagtggctatgcttctgaatcgcattcacatcaccttctaggcatattacataacacttagctatcctggggttgctccctacgaggttatcagctgatggttccaattttacaactggaaaaatggaaaccttgtccttgtaagtagtcctaatagaaatgtgacttactcatatgctcaacgggccacagagaaacaacatattatgttgtactttaattacatattatgtgtaattaaaaaaaaaaaaaaaagtccgttccttctaggcataaatgtgtatttaaaatttcatagtaaacaaatacttgtaagtgataatttccccattttccaaataagataatgttgaacagacattatgatgaattttatatttgatctctttttttggtaaatgtggttgtgaaaattgagttatatattcctcttttcaaaattctccgctaaacaagcacttgtttttgatattggtcaagacatttggcatactaagtaagggagcaatgctggggaagatacctgagaagacaagcgtgccctcccctcactatctccctcactttttttgctttgaggttttaacatcaagatataaattattttaaggtctcaaaataatcctttcacaaaaataagacagttttatgttgtaaaaacattagttatttgtcaaaggttatgttcttccatcttcatctgtcactagctgtcggcatctcctttaaagatcagttttttcttcataatgacacctgcatgcggctcgttggctgtccagatatggtttacaacctaaatgtataacactgtcaaacaagagctccactgttgtttcacatgcctgaacatgctgagttagtcctagtgttttctgtacatctcggcagatcttggagaggcaatactggaattcttcatcacagtcattcttgcttttgccacaggtctcatagcacctgtcgtgttggttgcaacactttgtcagggaagggataccaatgttaagatgaacaccaaacagtggagagccacatccattcggtggggagggtttataaccataacgtgggaaaggcttagatccgtcactgcatttatactggcagagaccgtcctcgcctcccaggaggtccaaggcggcgttcaggtacgtgtctatcttatgaacgccgttccggatggtcttcagggtggctctccagtcggtggtctgggcctgctcctggcacctgacaacagcggccatgaggaggagcaggagggtgagcgcggggcgcgagagcagggccatgcgcgcagcgccgggctctacgggtccccga

SEQ ID NO: 1504 - protein, 189 aa, Homo sapiens
MALLSRPALTLLLLLMAAVVRCQEQAQTTDWRATLKTIRNGVHKIDTYLNAALDLLGGEDGLCQYKCSDGSKPFPRYGYKPSPPNGCGSPLFGVHLNIGIPSLTKCCNQHDRCYETCGKSKNDCDEEFQYCLSKICRDVQKTLGLTQHVQACETTVELLFDSVIHLGCKPYLDSQRAACRCHYEEKTDL

SEQ ID NO: 1505 - DNA, 594 bp, Homo sapiens
ctaggtccagaatgtgcttgtcaggaagggtgtgcagcccagggttctctccgtgttcactgcctctttcctttgtcatcttcattctgccgttgagcctatctagtgggtttttacaatttcagttactgtatgtttagttcgaagttttccatttggttctcctttataccttctgtttctttcctgagacttctcatcattccctttatgttaagaatacccctccttacttcttggagtgttttttgtaatagctgctgtggagtctgtcagctaattccaatgtctctgttagctcagataagatgttgatcatcttttcccatgcgagttgaggatattcaccttctttgtatgctgagtggttctggattggtcctgaacattctgaatattacgttaggaagctgtggttcctgattcagtcctctggagagttgttggtagcttggttgtggcaggcactccaccagcttgggttcaggttctcagtccctaccattctgctgtgggttttggtgccgttttccaagcctttgtccactcttcagatctatccactatgtagcactccatggcctgtgtgggccc

SEQ ID NO: 1506 - protein, 60 aa, Homo sapiens
MFSSKFSIWFSFIPSVSFLRLLIIPFMLRIPLLTSWSVFCNSCCGVCQLIPMSLLAQIRC

SEQ ID NO: 1507 - DNA, 650 bp, Homo sapiens
  misc_feature (1)..(2): Wherein any n is one of a or t or c or g
nntctgggtgcgcggaccgggccaggctgcttgaagacctcgcgtcctgtgtcagcagagccgccctgcaccaccatgtgcatcatcttctttaagtttgatcctcgccctgtttccaaaaacgcgtacaggctcatcttggcagccaacagggatgaattctacagccgaccctccaagttagctgacttctgggggaacaacaacgagatcctcagtgggctggacatggaggaaggcaaggaaggaggcacatggctgggcatcagcacacgtggcaagctggcagcactcaccaactacctgcagccgcagctggactggcaggcccgagggcgaggtgaacttgtcacccactttctgaccactgacgtggacagcttgtcctacctgaagaaggtctctatggagggccatctgtacaatggcttcaacctcatagcagccgacctgagcacaggaagaaccccgtgtaaagactggaattttgctccccgagccaaggcatcaccagaagctgggagaggggcctgcttcagagcctcttttagagccttcagagggagcagacctgctgtcactctgatcatggacttccagcatccagagctgtgtgccaataaatgtctgttattttaaaaaaaaaaaaa

SEQ ID NO: 1508 - protein, 187 aa, Homo sapiens
MCIIFFKFDPRPVSKNAYRLILAANRDEFYSRPSKLADFWGNNNEILSGLDMEEGKEGGTWLGISTRGKLAALTNYLQPQLDWQARGRGELVTHFLTTDVDSLSYLKKVSMEGHLYNGFNLIAADLSTGRTPCKDWNFAPRAKASPEAGRGACFRASFRAFRGSRPAVTLIMDFQHPELCANKCLLF

SEQ ID NO: 1509 - DNA, 388 bp, Homo sapiens
agatctgtgttatttaccatctacgagagcagttctttggggtgtaagttgcaccatttcgtgcttcaagatattaactgtttcacaaaatgaaagaactgtagagcttgacaaggactttagaaatccttcaaggttaaacaatttattggaaaaatagagtaagtagtttgactggaaagtaggaacactactaaaaataattcattaggaaatgtgctctaccatgtataattataaacatattaagtttaaaagatattctgtggatgaaggcacttattcgcctcaggctctcattgatcaatattgcccagtaaaattatcttttaagtcagtttatttattgtgtctctcttcattgatatctcttgaccaaaatttgcaa

SEQ ID NO: 1510 - protein, 58 aa, Homo sapiens
MCSTMYNYKHIKFKRYSVDEGTYSPQALIDQYCPVKLSFKSVYLLCLSSLISLDQNLQ

SEQ ID NO: 1511 - DNA, 725 bp, Homo sapiens
ctatcaacctcatgctttctctctctctctatctatctctctctccccctccctctctgtctctgtctttctctgtctctctctccctgagacagtgatcatgttgtattgaaatggtctgtttccattctttccccaaatatcctgaaaactcttcgagggaaggcatagcatcttatttcttgtagccttcctacttactagaacacccaacagatactgctcaaatgaatgaaatgccacatttataccaagatatttgattttactacctggtaagtgtttatacattttctgctaagtaagactaacaatgatctgaggtgaatgtactaggagatgttatacaagagacaacggtatgggctttgttgaattctctcagctgtcccaaatgtttgctgagtgtcacttgctggaaggctctggatctggctacaatgtctttattaggagttctgtcaaattaagtattccctttagaattttctgagtaaagaattgctattttcaatactgttagagagttcggttaacttagctaccttagtctgtagcttttttgcattctctaatttatcttcttgaaaataagttctgttctgttgttgacttcccacactttatacttcattcatccagtaaacagtgaataagcatccaccagttaagggaacccctcaaccctcaactcatgcccggggttgaggggagtcctgctctta

SEQ ID NO: 1512 - protein, 93 aa, Homo sapiens [sequence omitted]

SEQ ID NO: 1513 - DNA, 493 bp, Homo sapiens
  misc_feature (1)..(2): Wherein any n is one of a or t or c or g
nntgtacacacacacacacaacagtgacttaaaagtggcaaccgcctcttgaaaagtaaaaatatgtcatccctccattctgcccttaaatgagaaataaagacaatagatttgcccactgcagactgggataccagaaaagacgttctaagtctcgcctgagacaatattaacctgctatcttaagtcccaacttggatgacttaaatttcagtgtacgtgcctccgttcccactcttgccccatcagctccatcagcatcgtcatccccggtcggatcccggccgcgacccgccagggccgccggagtccgcgaataccgcccgctcccagcaacgaagctccccggctcccggccgaccgcgagttcctgagcaacagcctccaaggttcccaaagcccacgattcaggcgagcggtgccgaccgggccgtggactgtggcattttaaaactacagctgccttcgagaaaatgaaaaactaaaaacgcgt

SEQ ID NO: 1514 - protein, 89 aa, Homo sapiens
ISVYVPPFPLLPHQLHQHRHPRSDPGRDPPGPPESANTARSQQRSSPAPGRPRVPEQQPPRFPKPTIQASGADRAVDCGILKLQLPSRK

SEQ ID NO: 1515 - DNA, 1370 bp, Homo sapiens
tttttttttttttttttttttttttttttttttttcaattttagcattaaatcttttattttgaaacatttttaggtttacaggagagttgcagaaatagtagagagatttcccacatatctttcatccagcttacataaccatggtacatttatcaaaacacagaaattaacattggtataatactattaaccaaactacagacattatttgaattttaccagtttttccactaatatcttttttcttttccagggctaagtccaggatagtacattgcatttagagctgtatcattgctttaaaattcttcacagattcacaatccctcattgcctgccctgggggctgaccactcccagctcccctactccacctgccttggtatacccctgattccactaaacttttgtggtattgggggtaagaagatctaatggcttcaagttagcaatggtgtgttaaaatttttttttttaataaaaacaaaataaaagaagatctaatggttgtgaagtctcatcctttggtgaaaggtgctgttgagcctgatacaatatattcaactgccagagcacagacacttctactttgtctagctggagattctttagccaggtactccttgacagtgactgttaggtaagcgacatttgcaaggtttaagtgcctagtgcacagaaatcagaaagcaaggcttgttttaggcaaacgtgccacatatcttgtaaggtaaagagacaaaaatataaccggtgaaacgcactgaaaaaaaatcctggcatagacactccgggtgcctgctccacatacattctccatttttcatcagaattcttgttttgttcaggtgaaaggtagccaggctcttcaaaggaggctggactttttctcagcctctctgaggatgcattcttggtaaagttaatctaatcacgtcaattccactcactttgccaatgattggtttagaaatgggcatgggatacaatctggccaataaggcatggggagaagtttgaggtttataggaaagttttcttcactctccaaaagtccctttccttcttgtctgaatattgggtcttgttgtttgagttattctgtgttaaaggatagaacacctggagctgttgcagccactttgtaaccatgaggggtaagcctggctagttctggctcagggtctctcatgaggttgtagtcaagagattagcaggggctgatgtcatctgaaggcttaactggggctggaaaatctgcttccaaggtggcacactcatgtctggcaagtcagtgatggttgttcgcaggaggtctcagccatatggaggatatgcctccacaggactatgagtatcctcacaaag

SEQ ID NO: 1516 - protein, 50 aa, Homo sapiens
MYVEQAPGVSMPGFFFSAFHRLYFCLFTLQDMWHVCLKQALLSDFCALGT

SEQ ID NO: 1517 - DNA, 505 bp, Homo sapiens
tgatcagccaaggcctggatcagaggggagcttctgtgcatcttcaaactctccaatgcactcccaaggccagcagttctctggtgtctcccaacttcctggacctgtgccaacttcaggagtaactgatacacagaatactgtaaatatggcccaagcagatacagagaaattgagacagcggcagaagttacgtgaaatcattctccagcagcaacagcagaagaagattgcaggtcgacaggagaaggggtcacaggactcacccgcagtgcctcatccagggcctcttcaacactggcaaccagagaatgttaaccaggctttcaccagacccccacctccctatcctgggaacattaggtctcctgttgcccctcctttagtacctagatatgctgttttcccaaaagatcagcgtggaccctatcctcctgatgttgctagtatggggatgagacctcatggatttagatttggatttccaggaggtagtcatggtacc

SEQ ID NO: 1518 - protein, 150 aa, Homo sapiens
MHSQGQQFSGVSQLPGPVPTSGVTDTQNTVNMAQADTEKLRQRQKLREIILQQQQQKKIAGRQEKGSQDSPAVPHPGPLQHWQPENVNQAFTRPPPPYPGNIRSPVAPPLVPRYAVFPKDQRGPYPPDVASMGMRPHGFRFGFPGGSHGT

SEQ ID NO: 1519 - DNA, 1790 bp, Homo sapiens
cagaaaagtttgtttttaaacagactgagttaaacagtgatgttggctgtaagtcaaggcactcacaaaagttgagggaaatggatgtttatgatcacaattttataggatgctgctttttcttaagcatttaattggaatgcaggaaaatacttgctatgcaattggctgctttggttccacgaaacgtaatgccctagcctcgagcctaggagacccaaggttaagatgcgctgggtcaccgagcaccttgcctccgggaaacaagttcgggaaaggttagcccagcttgtcaagaacgtcacaactccatccatgcctcttgtaaacttgaaatgaaaacattctttcaattctgagcaatagaaagcacttggaaaggtctttttttttttttttttttttgacatgataaattcagcctcactgtagtccagagtgagaattagaacataccaacttccaatctgcctaaatgtgacagcctctgcccaagactggctcactgaggcgtcttggctactggatgtaaacaaaaaatgcaatatccgtgcctcccagttctttgaaggaatcaattcatccttggttatatctatgctggaaaactgtgggtgtcctttggataaagcatacaggagttatctaccaggatttagatttggtcccttctgtaaatattagcctgaacgttgagttctgtgaacatgaattcttttcgaattccattacaatgcaggcagggttttggtgtcaattttttaaaatcaaaatcacctactaaattagttattttggggggaggatctagacacttgatgattctcagtgaccagatccaggctcagggctgaagtcagcataattcttgagcaagaaaaaggtgattccttcttccacaaagccattccttctcctgagatgccatcttctagagaggtgactaacaggctctgagtgggggttttattatatgggtttttgtttcctggaatgagtaacaaatgtttcaagaatacatcatttctcttaaaaaaaaaaaaatcaacctatgtgtaaaaagagacatttaaaaagatttctgaccatttataaatataaatctaattccaacaggggtgtaatattttgaggacaggtaaaaagcataaaaatacaggtaagaaaataaaatttaataacatagtaatctggattgctatacatattatcaagcagcagcatctttgtacaatacaggaagacttgcaaactttggaaatatactacattcagcaacacggtagacctgtcagagtgctacatatttacattaacttagatgtagcagtgcaaaccttcactcaactgagatccttctaacacacgtgcaacacacccatctttaccatttagacacccctactttctcattctcttagaggatcttattgcctcttcccgtactggaaatatttcatgagccatccttcttggcaaaatttcctcctagcatttgtaactgacaaaacttccttgatagctgtcagttcctaatacactttctcttgcctgtttatgtctcaaatctaatgcttttgtttctctttcctttgcgatttgttacagttgtttatgaaagtgcttcctataatatccagctaagatgtcttagaaaaacagaggggtttatttgtgtgtgtattacacacacacacgcgtacaggaggttgagctaccaggaggccgtttttgctaacatagttagaaaactgatggcaaatgcattagtcctttttcaccccctgtgc

SEQ ID NO: 1520 - protein, 95 aa, Homo sapiens
MSKKKKKKKTFPSAFYCSELKECFHFKFTRGMDGVVTFLTSWANLSRTCFPEARCSVTQRILTLGLLGSRLGHYVSWNQSSQLHSKYFPAFQLNA

SEQ ID NO: 1521 - DNA, 1415 bp, Homo sapiens
tccttctatacctcaaatctgattctaagaatttcttactgtgataatcattggcatgccacctgaggtcaaggagtgccaaataggactttccactcatgctcaagatcaaaactttatagaacagtcaacattttagattcggtaaccttttttttcttccaattataatctctgctagccacttccgccagcagttggtggaagacttactaggtgcagggcactttccaagttcatcacaacaacctgcttgttttcatgagacaataatccgaaaagttcgctttgatatattcctggagggccaagcccatctatttacaaaaggtgaacagcaaaatcaagcactgctttatgggcaggaacacaagagaaagcaaactgcccaagaagtcatcatgtcagaaactcaatctcaacaaaataatttccatcagggaacttcagggtttcttgggggcttatgagtctcaccggtcaacccaggaggcctcactacaagagccttgacaaggcactgttttttgtgggactgggagttcacactgatgaagcaaacctttgaatttttgcacagctcttgtcagaaagccctgagttccccctggataaagagttaattttaatccttccctataattatacttcaaaatatttgacatctgctattatgccttctttagatctttcttctgtggtgcagacatttctagtaagtgtttgactacttgtatggcattagctttcacagaaaattgtttcacttaaaactgtggattggcctaggctaaggacaaaaataaactaagtacctgtagtgtatttatgtgatatgtgtcaagttactcaaagttattgctgttggaactgaacaataatatttcccagatagctggccttagcatgtgatcacggttgttgtatttttaatttttgtcttttacagtatgagaggtgtaggttaatttgtttatttcctataaatttgtatttatgtgtatataaaatgtacaatgaatgtaaatatgactttctggaaagtttagactacatttagaatctctattcaaaatcaaaatgctgctcaaatgaatttaaccaacatctaggtgcttaatttctcattttatcccacttatgagattgggaaaaagatcaatatgagaaataccatacagataccttaaatgtatgcatttgtgcaacaatttttgagaaggtgagtggcaatttataatttagttggcaatttataatagaacttatagcttttaaaagaccttttaaagacattaaatgtaaacttaaaaatgtttagatcttgtttcaaactttacaatagcattcttcaaaatattaagttatatattttataggcatttagttgcttattaaaagcactgattttcaaa

SEQ ID NO: 1522 - protein, 63 aa, Homo sapiens [sequence omitted]

SEQ ID NO: 1523 - DNA, 469 bp, Homo sapiens
ttttttttaagggcggcgtgttggccaatgagactttattgtgaaataaaatgccctcagtttcatttaactgagccaccatagaagagtggagaaatcgagttggccagatgagggagaggccattaagagatattttagggattgaatgggctgggcacccagaggacagtggcatttggggtggtaatgagaaggaacattaggggcctccgcctccttccgttcctcctgtgctgagtcagtcagcacagaggctgcaggaggtatctctggttggctttggctgcctgtagggggcaccagctttggggaggtcagagggctctctcctgagctgctgtcctgcccacaatcacacctgcctgatgcctgtgaatggccgtctgagtctcttgggccttggtcacttctggcttgccctgcaccgaccagtaactgtgcctgatgactggaggtattggaattc

SEQ ID NO: 1524 - protein, 59 aa, Homo sapiens
MPLSSGCPAHSIPKISLNGLSLIWPTRFLHSSMVAQLNETEGILFHNKVSLANTPPLKK

SEQ ID NO: 1525 - DNA, 566 bp, Homo sapiens
cggccgctcgcccgccacagcaaacttggagcagtctcccggccctctggaaagaaacttagggcaattgggattggaggcagcatcccattctcggttctggagcccaggagctgccagggcgtctggatcctccggggcaggagaaatgagctggtcgggtttggagagtcttcctgggggcatggagagaacctgccgcagtgcctggagcaaggattgcagcgtggctgaaggcggaagacgccttaggcaactgcctgcagccgagcctgatggggacccagggacagatccctggatcaggacccatgggacctatctaacatttccaagtggctttcttagagatggcagatgagatctggaattgtcatattcatttttttgggcagatagctactgacaaggagaagcacttttctggtttaaattttatagcagtatacaataatactagaagaatgtgaatgagacttatttttaataagtcaagttaaacggaaattggaaattgctcaccttcttgtatttcactaaaataaacattttacacttaaccactg

SEQ ID NO: 1526 - protein, 84 aa, Homo sapiens
MGPDPGICPWVPIRLGCRQLPKASSAFSHAAILAPGTAAGSLHAPRKTLQTRPAHFSCPGGSRRPGSSWAPEPRMGCCLQSQLP

SEQ ID NO: 1527 - DNA, 630 bp, Homo sapiens
  misc_feature (1): Wherein n is one of a or t or c or g
ngccgtgaggcgtcgccagcagtgggcagtggggcccgagccactgcagggcgaggcgtcccggcgactggctgcacagcgccgctggagcccgacgtgcgcgcggtggtggtgggctttgacccgcacttcagctacatgaagctcaccaaggccctgcgctacctgcagcagcccggctgcctgctcgtgggcaccaacatggacaaccggcttccgcttgagaacggccgcttcatcgcgggtaccgggtgtctggtccgagccgtggagatggccgcccagcgccaggccgacatcatcgggaagcccagccgcttcattttcgactgcgtgtcccaggaatacggcatcaaccccgagcgcaccgtcatggtgggagaccgcctggacacagacatcctcctaggcgccacctgtggcctgaagaccatcctgaccctcaccggagtctccactctaggggatgtgaagaataatcaggaaagtgactgcgtgtctaagaagaaaatggtccctgacttctatgttgacagcatagccgaccttttgcctgcccttcaaggttaaagattgagtgtctttaatctgcagaataaaaaaaaagaaattgaaaaaaaaaaaaaaaaa

SEQ ID NO: 1528 - protein, 189 aa, Homo sapiens
  VARIANT (1): Wherein Xaa may be any one of Arg or Cys or Gly or Ser
XREASPAVGSGARATAGRGVPATGCTAPLEPDVRAVVVGFDPHFSYMKLTKALRYLQQPGCLLVGTNMDNRLPLENGRFIAGTGCLVRAVEMAAQRQADIIGKPSRFIFDCVSQEYGINPERTVMVGDRLDTDILLGATCGLKTILTLTGVSTLGDVKNNQESDCVSKKKMVPDFYVDSIADLLPALQG

SEQ ID NO: 1529 - DNA, 764 bp, Homo sapiens
cccacacagggcaggcaccccacacagggcacagaccccacgcaccccacacggggcaggcagctcacacagggcacagaccccacgcaccccacacagggcacagaccccacgcaccccacacagggcacagaccccacacaccccacacagggcaggcacctcacacagggcacagaccccatgcatcccacacagggcaggcaccccacacagggcacagaccccacacaccccacacagggcaggcaccccacacagggcacagaccccacgcaccccacacagggcagggatcccacgcagggcacagatcccacgcagggcagggccagcccaaggccaggcccctcccctgtagatctcctcccaggcaggaccagagccacagtcacttccacactatctccttccctagaaacctctgcagactcttcctcctctcctcgatacacaggggcccctgccacagcctgactctctgccacctcgtgagtctctggaaagcagggtcggcctctgaatacagaggacttgggtcctgccggaggatgcttggccagtgggtgctggcacgtgagcagcccccggggagtcagagtggggctgcagcgaaggccgtggtggtcgaggtgagggtggtggccaggtcttgttgccgcagtgaggattctggggttaccctaagagccaccacattcaggcactcaagaaaaagcacgtcaaaataaaatattttcacatgattaaaaaaaaaaaaaaaa

SEQ ID NO: 1530 - protein, 158 aa, Homo sapiens
PTQGRHPTQGTDPTHPTRGRQLTQGTDPTHPTQGTDPTHPTQGTDPTHPTQGRHLTQGTDPMHPTQGRHPTQGTDPTHPTQGRHPTQGTDPTHPTQGRDPTQGTDPTQGRASPRPGPSPVDLLPGRTRATVTSTLSPSLETSADSSSSPRYTGAPATA

SEQ ID NO: 1531 - DNA, 679 bp, Homo sapiens
tggccattacatgaaggccaatcccctggagttgggtagtgcactacatgaaggccaatcccctggagttgggtagtgcacaacttgaacatctgtacctggaagccttaccggtataggttacatgtacacaatacatgtccaatatgtattattttgaatgaatgaataatgtgcatgaagaacaatttgttgaagaacaacaacgaaaaacctgtatgggactatgttttataactgttgttaggcagttgattctgtcagttgccagtgacagaatcctaattcaaattggtttctgacacaagagaatttattattttgagtaactaaaatgtctaggtcccggagtacagccaacttcaggcatggctgggagcaagggcccataggatgttgacagaaatctgtttcagtctctagactctgcttgcctttgtgatggtttcattttcccgaaagatctccccacgaggttgcaaagatggcctctagcagctccaagcttgcaggaactctggcaataaatgagctttttttccagtaatcccagcagaagttctggctcaaggctcattggaccactgtgattgatatgcccacctgtgaaccagtcacagaggtggaggttagatgatgttagaggtacaataaattgattggcagacctggggcttgg

SEQ ID NO: 1532 - protein, 54 aa, Homo sapiens
MSLEPELLLGLLEKKLIYCQSSCKLGAARGHLCNLVGRSFGKMKPSQRQAESRD

SEQ ID NO: 1533 - DNA, 501 bp, Homo sapiens
  misc_feature (1)..(442): Wherein any n is one of a or t or c or g
nnggatccctactccaccaccttcagcagcttctcccgagtgaccaacttcttccggggtgccctgcagccacagcctgagggagccgcctccgaccttcccccgccacccgacgatgagcccgagcctggattcgaggtcatttcctgtgtggagctggggcctcggccaaccgtggagcggggccctccagttacagaggaggagtgggcacgccacgtgggccctgaaggtcgcctgcagcaggtccctgagctgaagaaccggatcttctcggggggtctgagccccagcctgcggcgcgaggcctggaagttcctcctagggtacctcagctgggaaggcacagctgaggagcacaaggcccacatacgcaagaaaacggatgagtatttccgcatgaagctgcagtnggaaatctgtgagtccgagcaggagcggnagaaacacttctggcatggataccgcagcctcatcgaaagggatgtgagccgcactgac

SEQ ID NO: 1534 - protein, 167 aa, Homo sapiens
  VARIANT (1): Wherein Xaa may be any one of Ala or Arg or Gln or Glu or Gly or Leu or Lys or Met or Pro or Ser or Thr or Trp or Val
  VARIANT (138): Wherein Xaa may be any one of Leu or Ser or Trp
  VARIANT (148): Wherein Xaa may be any one of Gln or Glu or Lys
XDPYSTTFSSFSRVTNFFRGALQPQPEGAASDLPPPPDDEPEPGFEVISCVELGPRPTVERGPPVTEEEWARHVGPEGRLQQVPELKNRIFSGGLSPSLRREAWKFLLGYLSWEGTAEEHKAHIRKKTDEYFRMKLQXEICESEQERXKHFWHGYRSLIERDVSRTD

SEQ ID NO: 1535 - DNA, 656 bp, Homo sapiens
  misc_feature (1)..(289): Wherein any n is one of a or t or c or g
nnctggccttgaccctagaatccagcttgacctcctccccagcccaacctcacctccagcccattccccagataccccatcccagcccctagcaaagacccccagcctctgcctcagccccatgatcaggtatgtggcatccaggccagccttggcccatcccaggcttaccccaagcctcctacctggccccacagtcacaggtctcctcaaccccccagaagccagccgtctctcccaagcccccgggtgggaccccagaagccaccccacccaccatatctgtcanctcctagtcctgcccctagcagccctcctgagttcccagctgtctgagtccccagctttggcgccagccctttgccccactctgggggagccaggagcccgcccttaccgcggggggccgtagcttggctgtgacttagccctggttcatgtggttctcgtcctctcctgtcccttccagcctggggcccccagaagcagcaagtgaccttatttctccagcaggcggtggtagggagtgtgcggtggtgaaaacaggggcttcaccggtcctggctcagatccaggtccttggagggaaaaggagggcaggagacgggttgcaccgcatgtaccctgagggctcatggtgaataaaggccccttcc

SEQ ID NO: 1536 - protein, 101 aa, Homo sapiens
  VARIANT (87): Wherein Xaa may be any one of Ala or Pro or Ser or Thr
PPPQPNLTSSPFPRYPIPAPSKDPQPLPQPHDQVCGIQASLGPSQAYPKPPTWPHSHRSPQPPRSQPSLPSPRVGPQKPPHPPYLSXPSPAPSSPPEFPAV

SEQ ID NO: 1537 - DNA, 710 bp, Homo sapiens
tcacttaaggtaaacgtgtgaaaaaagtgactgcagtgtgtttgaaaccacaagctgtttctatgtcataaattaacatcagcttgcaagtctctgaaagaaccactcatttgtaattggtatatatgtcacaacctcccacattcctttagcccatctcagggaattattgaaacgctggcagggttagtttcattttgttttggtttttttgggtttttttgtttgtttgaggattttttttttcttttatcatttgtttgctcctgtgtaagcttaatatataatggcagtttggcatctgttcttcgcacatgtctaacccagcagagttatgcaaaaatgatgacttcattttaggtcaaattggctttgttcccagtcctcattgttggtcactttgttcagttctggtgactcattggtgatgttgatgaaactgctcagcctgccagctgggatattgatggcaggtctaggcttcattgttaggtagaagattgaatacttctcactttatacaaatttacattggctattgctcccatgtgttagctagtccttaacatgtttgttatttcgttatcttattagctgacatacggagtggtattattagtgtcgtactccttagcgtgagcatgacaattaagttaccttactaacagtgattgagtaaccatactctgatctaaacccattgttacgag

SEQ ID NO: 1538 - protein, 62 aa, Homo sapiens [sequence omitted]

SEQ ID NO: 1539 - DNA, 3732 bp, Homo sapiens
  misc_feature (1): Wherein n is one of a or t or c or g
ncaggtgggcccttgcccaccccaccctgggaaggctgggccaggatggggcaggcacctcaccccggccaggaacaggaacgggcaccatctcggggactgatgttttttgaatggcgctatccaccctgccctgctcggcctggctgtgcaggcctcttggtaccacgtctgttcgtaatgaccgtaacaactctattttcttccacagatgactctggggacgacgacgaggctaccaccccagccgacaagagcgagctgcaccacaccctgaagaatctttccctgaagttagatgacctcagcacgtgcaatgacctcatcgccaagcacggcgctgcactccagcgctccctgacagagctggacggcctcaagatcccatctgagagtggggagaagctgaaggtggtgaatgagcgggccaccctcttccgcatcacatccaatgctatgatcaacgcctgcagggacttcttggaactagcagagatacacagtcggaaatggcagcgggcactgcagtatgagcaggagcagcgcgtgcacttggaggaaaccattgagcagctggcgaagcagcacaacagcctcgagcgggccttccacagtgcccctggccggccggccaacccctccaagagcttcattgagggaagcctcttgactcccaaaggagaggacagtgaggaagatgaagataccgagtactttgatgccatggaagactccacatccttcatcaccgtgatcaccgaggccaaggaagacagcagaaaagctgaaggtagcaccgggacaagttccgtggactggagctcagcagacaatgtactagatggtgcctcgctcgtgcccaagggttcatccaaagtcaagaggcgagtccgcattcccaacaagcccaactacagccttaacctctggagcatcatgaagaactgcatcggccgggagctctccaggatccccatgccggtgaacttcaatgagcccctgtccatgctccagcggctgacagaggacctggagtaccaccacctgctggacaaggcagtgcactgcaccagctcagtggagcagatgtgcctggtggccgccttctctgtgtcctcctactccaccacagtgcaccgcatcgccaagcccttcaaccccatgctgggggagaccttcgagctggaccgcctcgacgacatgggcctgcgctccctctgtgagcaggtgagccaccaccccccctcagctgcgcactacgtgttctccaagcatggctggagcctctggcaggagatcaccatctccagcaagttccggggaaaatacatctccatcatgccgctaggtgccatccacttagaattccaggccagtgggaatcactacgtgtggaggaagagcacctcaactgttcacaacatcatcgtgggcaagctctggatcgaccagtcaggggacatcgagattgtgaaccataagaccaatgaccggtgccagctgaagttcctgccctacagctacttctccaaagaggcagcccggaaggtgacaggagtggtgagtgacagccagggcaaggcccattacgtgctgtccggctcgtgggatgaacaaatggagtgctccaaggtcatgcatagcagtcccagcagccccagctctgacgggaagcagaagacagtgtaccagaccctgtcagccaagctgctgtggaagaagtacccgctgccggagaacgcggagaacatgtactacttctcagagctggccctgaccctcaacgagcacgaggagggcgtagcgccaaccgacagccgcctgcggcccgaccagcggctgatggagaagggccgttgggacgaggccaataccgagaagcagcggctggaggagaagcagcgcctgtcgcggcgccggcggctggaggcctgcgggccgggcagcagctgcagctcggaggaaggtgaggccgggcgggaagggcgccccggaggggaggaaaggggtgcccgggtgggggtgccgcagggacggattccgggggagcaggccacaagcccacccaccagcccactgtgcctgcccagcagagaaggaggcggatgcctacacgccactgtggtttgagaagaggctggatccgctgaccggggagatggcctgtgtgtacaagggcggctactgggaggccaaggagaagcaagactggcatatgtgccccaacatcttctgagcgccacccttgcaacaaatacaggcgcctgcacagcctggcccacctgttcattaatgcactcaatttagtactgaatggtctttctcccagcccattcccagcccttcctatttcctttcctatttttttttttctccccacactttcttgggactcccaccttggaaggaggaagggctgacctgggttctctccagcccccaggtgcgccgggtcacccgtgccccttcattatggacctgggccctaccggaacccctgccccagttaccacaactcagggccggctggcccgggccatgggctgcgcaaatcaccagcccccaacccagggaggaactggcccctcctagggagcctcttcgacttttttagaaaaatgatctccatttctttccagccatgatgtttagtaaatatttttagtaccgcacttagcagacagctttccaagtgtgctttcttgccacaaaagtgtcctggcaagagccccttatttttaagacatcaggaagccagaccgctttgagttgggagaattttgtagctcaacatatcaagtcctcgatggtatctgagctgcccacacccccacctgccaaggccccacagagcccaaaacagaagggggctgccccagcccagcagagcacagagtttctggagctcccatccacagatgcaggagggggtactgatggtaacccccatgtggatttgagggcagcagtccctggcctcaccctagccagcctgggtggctccctagccccaagaggccaggaagggctggaaggcagggcctgcaggtgctccccgccctgagacccaggccccaaatcagcaataatgaacaaacccttggcccagcctgggctggtgacctgggcaccagagaccttgcatccctcctcatcctaggaggcccctaggggtgccccatctcagtgtcccctgaactctttatttgcctaatttatatatatatatatgagatatataaatatatataaaatagctattttgcttaaatttctacagtatgtaaaagtgaaaaaatgatgaagacgggtgcacctgtctgagtttggccctcatgtgagctgtgcccttccctctcctcatgcccccttccagcggcttctgccaaccatggggggctggaccaccatggccactgacccagcccctcagaatcccacactccaatcctttccatttcagtttagtcctaaaagttcatcacagggtctttctttctactccaggactggttttgtttttatatatataaaaaaaaaaagtgaaaacaccaatgtgtgaaatgccttacaatgcccactggagaggcggggcggggtggggcaggatggccccactagggctcctacagagctgtggaatgtacctctccccaacactgttttgttagcgagcaccttttgaccagtaataaaaaaccttggctttggagttttccactgaaaaaaaaa

SEQ ID NO: 1540 - protein, 642 aa, Homo sapiens
SSTDDSGDDDEATTPADKSELHHTLKNLSLKLDDLSTCNDLIAKHGAALQRSLTELDGLKIPSESGEKLKVVNERATLFRITSNAMINACRDFLELAEIHSRKWQRALQYEQEQRVHLEETIEQLAKQHNSLERAFHSAPGRPANPSKSFIEGSLLTPKGEDSEEDEDTEYFDAMEDSTSFITVITEAKEDSRKAEGSTGTSSVDWSSADNVLDGASLVPKGSSKVKRRVRIPNKPNYSLNLWSIMKNCIGRELSRIPMPVNFNEPLSMLQRLTEDLEYHHLLDKAVHCTSSVEQMCLVAAFSVSSYSTTVHRIAKPFNPMLGETFELDRLDDMGLRSLCEQVSHHPPSAAHYVFSKHGWSLWQEITISSKFRGKYISIMPLGAIHLEFQASGNHYVWRKSTSTVHNIIVGKLWIDQSGDIEIVNHKTNDRCQLKFLPYSYFSKEAARKVTGVVSDSQGKAHYVLSGSWDEQMECSKVMHSSPSSPSSDGKQKTVYQTLSAKLLWKKYPLPENAENMYYFSELALTLNEHEEGVAPTDSRLRPDQRLMEKGRWDEANTEKQRLEEKQRLSRRRRLEACGPGSSCSSEEGEAGREGRPGGEERGARVGVPQGRIPGEQATSPPTSPLCLPSREGGGCLHATVV

SEQ ID NO: 1541 - DNA, 950 bp, Homo sapiens
  misc_feature (1)..(2): Wherein n is one of a or t or c or g
nntcgacctccagcctgggggacagagcaagaccttgtcttgaaatgaacaagaggattaggattgagatgtttttgtttgtgtttgttttttaatttttctggagaaaggctcacttttcctagaggtatgaagtaagtggaagtagggctggattcctcacccctttttggcctgtctaggtggaagcactgcaggctcagctgggagagcagaccaaactttctcgagaacaaattgaagggctcatcgaggacagacggattcaccttgaggaaatacaagttcagcaccagagaaatcagaacaaaatcaaagagctaaccaaaaatcttcaccacacccaagaactgctctatgagagcaccaaagattttctgcaactcagatctgaaaaccaaaataaagagaagtcatggatgcttgaaaaagataatttgatgtcaaagattaagcaatatagggtgcagtgtaagaagaaagaagataaaattggaaaagtgttgcccgttatgcatgagagtcaccatgctcaaagtgaatatattaagatcctaaaataagcaaaagaagaccatcgaggagagaaaagaaagttctgagcattaccaaagagacatacagacactcatcctacaggtggaagcactgcaggctcagctgggagagcagaccaaactttctcgagaacaaattgaagggctcatcgaggacagacggattcaccttgaggaaatacaagttcagcaccagagaaatcagaacaaaatcaaagagctaaccaaaaacgggtcatagaactaaagggagccttgaaaagactgtcttcctcagaaacccccgcctctacgtagtcttcaccacacccaagaactgctctatgagagcaccaaagattttctgcaactcagatctgaaaaccaaaataaagagaagtcatggatgcttga

SEQ ID NO: 1542 - protein, 79 aa, Homo sapiens
NKQKKTIEERKESSEHYQRDIQTLILQVEALQAQLGEQTKLSREQIEGLIEDRRIHLEEIQVQHQRNQNKIKELTKNGS

SEQ ID NO: 1543 - DNA, 1100 bp, Homo sapiens
ttttttttttttttttttttttttttttttgacagcagaagtctttttattcaaatctcccaccttacagatgtccagaataatcaacatatttcaaagggtatatttcaaaaacgtactagcaactcagccagccactgtcacatggaataagaagacatgccctggccattagaaccatgctgtcctcgctcttgtgtccctccacgggacagacatcaccttgcaagacaactcgtgccactgtccccaacagttttccacagagttcttgtttcccttcatctgaatcttctctgtgcaatttgatgtcctgaactatttctgacggttgcacacaagatctcagggactggaccttttagttatgagaccagccctcttagacagcagacagtaggtacagtgcttgctctcccttctttgcatccttccagagttgccttcatcctcatttcctgcatctggtaaagtctctctgaaaatgtgaaaccgacgacagaacatggcaagctggatggagaagccgacaacccctcccccactctcacccaacgccgggccggtcctgtttcggatcctgcacactgtggaagcttcttgcttccttgttttggtgggtgaaatctttgctgttcaaaaaggtgtttttgcacagaaattttaggacgtgtttattctagtaacgtagtgttttcttttttcgctatatttacatgtggagaactccagggaggcccccaccagagatcccttaaatgctggtctctgtccctgcttctcggccccgctggccttttggagccatcgtgcttcccagtccgcaggcaacaatcacagcatcacctgcaaggggcagcaaagtgaaccgcggacccctggagtgacgccttggagatggaccctttggatttgggaacccctctgacggccgggactcccaggattcccttccatagagggagtccacggtggtcgcaccggcggctgagtcctccttagagtgccgaatcagagaagacccgcatcaggtttgggatgtaagtggagagggagaggttagaaagaggcatcattggataagcaaagaatcctcgtgc

SEQ ID NO: 1544 - protein, 53 aa, Homo sapiens
MASWMEKPTTPPPLSPNAGPVLFRILHTVEASCFLVLVGEIFAVQKGVFAQKF

SEQ ID NO: 1545 - DNA, 504 bp, Homo sapiens
atgggttattgtttattttccattagtgagactgatgcacagtaaattatgtgtgttatacaccctcttcaaagccagacttcacattttaaagtgttcaatgcaaagtcctatctaacattaaggatatgtgtgattcttcatgtggatctgcagcagaaagctgaagatgacgtgatctctggtacctccattcagaatactgcatttgttagctggattggaaagaagcaacttcaggagacacttctttgaatcagttcatttgttcacatcaacattcactgagtgcctaatgtgagccaggtgctgagctggaccggctgcaggcttgggatcaaagccttcctctggtctctgcacagcacctcaggttctccagtcagcccatggtcatgcagcatgtaagcggcagagctgagagtaccccaggcctcctgacttccagcccagtagtcttttccaggaatcaagctgcctctcggaagactcaggtcttctaga

SEQ ID NO: 1546 - protein, 68 aa, Homo sapiens [sequence omitted]

SEQ ID NO: 1547 - DNA, 368 bp, Homo sapiens
  misc_feature (1)..(2): Wherein n is one of a or t or c or g
nncaggacatcacaaaggcgatttttgagaactgatagtgcatcagccgacccaggtaatttaaaatattcttcatccagagatagaggtggttcttcctcttacggactgcaaccttcaaattcagctgtggtgcctcggcaaaggcacgatgataccagagtccacgctgacatacagaatgacgaaaaggagagatcgatgtcttattgtgatgagtctcgactgtcatatcttcttcggaggatcacccgggaaaacgaccgagaccgaagattggctactgtaaagcagttgaaagaatttattcagcaaccagaaaataagctggtactagttaaacaattggatatcttggctgctgtaca

SEQ ID NO: 1548 - protein, 112 aa, Homo sapiens
TDSASADPGNLKYSSSRDRGGSSSYGLQPSNSAVVPRQRHDDTRVHADIQNDEKERSMSYCDESRLSYLLRRITRENDRDRRLATVKQLKEFIQQPENKLVLVKQLDILAAV

SEQ ID NO: 1549 - DNA, 772 bp, Homo sapiens
  misc_feature (1): Wherein n is one of a or t or c or g
ncggccgtccatccgtccgtccctcctggggccggcgctgaccatgcccagcggctgccgctgcctgcatctcgtgtgcctgttgtgcattctgggggctcccggtcagcctgtccgaggtgagcgcgcccgctgggctccagtcgcggccctgtccagccgtcctcgcttgcacgttgacctctgccggccggaggcggcactgcagtcgctccgacccgcggggcaagcaagaccgaggttgcaatgaaagaggatctttcttgatgagtttgagtagttgactcactgggagattgggcaaattcaggcttccatgggcgtgactgcgagcgcaaggctggaccctgtgaacaggcaggctccccatgccgcaatggcgggcagtgccaggacgaccagggctttgctctcaacttcacgtgccgctgctggtggggctttgtgggtgcccgctgtgaggtaaatgtggatgactgcctgatgcggccttgtgctaacggtgccacctgccttgacggcataaaccgcttctcctgcctctgtcctgagggctttgctggacgcttctgcaccatcaacctggatgactgtgcaagccgcccatgccagagaggggcccgctgtcgggaccgtgtccacgacttcgactgcctctgccccagtggctatggtggcaagacctgtgagcttgtcttacctgtcccagaccccccaaccacagtggacacccctctagggcccacctcagctgtagtggtacctgccacgg

SEQ ID NO: 1550 - protein, 165 aa, Homo sapiens
VVDSLGDWANSGFHGRDCERKAGPCEQAGSPCRNGGQCQDDQGFALNFTCRCWWGFVGARCEVNVDDCLMRPCANGATCLDGINRFSCLCPEGFAGRFCTINLDDCASRPCQRGARCRDRVHDFDCLCPSGYGGKTCELVLPVPDPPTTVDTPLGPTSAVVVPAT

SEQ ID NO: 1551 - DNA, 564 bp, Homo sapiens
aggaaaaacaaggcgaagaaggggaaaagaaagagaatttatttcaaaaaaaaaaaaaaaaatgatatcagttggtggatgctcctataggtagccaaacacattgattacctgttagattttaggatagaaatcaaagtagagcacgtcagcaagagcctctttgtctcactccatcatttaaaaccagtatattcagtagttgaagaaagagctctccctgagtcagttgcaaaacgtctatatttttagatgccactacttttttcttaaatattcattttgagactgtcatgagttagaccagtggttgagattagtagatggctcactagacatgtttttgttttgcagacattatatccattccagtcctctgcactgtacactgcagcagtgtgcaaactatgggacttagagggtttctgccatctttccatgtgtgaagtagcttggtttcctctgcctgtgcatttggatgtttgtgctatgtccacctcctaaactggctactgagaaaatcatcttcagccctgtcagattgtctctggcagtagctcctaa

SEQ ID NO: 1552 - protein, 56 aa, Homo sapiens
MERWQKPSKSHSLHTAAVYSAEDWNGYNVCKTKTCLVSHLLISTTGLTHDSLKMNI

SEQ ID NO: 1553 - DNA, 610 bp, Homo sapiens
tttttttttttacacacatgaacagcatttatttttcatgcactcaacacatgttcaagcctacggactctctgctgggccctgagcggggccctgggaacagaggtgtgagaaacctctaagctggtcgaggccagggccagtatcgtcccccagcacagagcctggtggccgctgtcacctagtgagtgtttgctgaatacacagaaggtcatgtggggtgagcaggttgggcagggcagctggaataaggggtgctgtggctgagaccaagaggggcttgtccccacctggaagcacctcagtcgccgggttcctggtcctccttgctgatggctgcagactctgggaacagggaacccccttctgcctcagagaacttgcctagggagtggagacggccaccagccccctgaacagtggcctcaactcctccctgtcctgagcccctgggcttctggcagcttggtgcctgctgcctgaggtcaggctgaacggcctgggaccacgtgtctatgtccaagccgcagagggcccacccctgccccgtgatcaggttaaggcctggcagggctggggaagggaagggacatgcagcaggaggtcatgg

SEQ ID NO: 1554 - protein, 59 aa, Homo sapiens
MTFCVFSKHSLGDSGHQALCWGTILALASTSLEVSHTSVPRAPLRAQQRVRRLEHVLSA

SEQ ID NO: 1555 - DNA, 447 bp, Homo sapiens
ttatttttttatttttttcaagactccgtctcaaaaaaaataaaaaaataaaaaaaataaaatcacctggaatcaaagcagcagggacagcctgcgctggagccgccagaacaggcaggcgggcagctccgcaagaccgagcaactccaggacgggagacgagaactggcagctgacatgaccctgtgaccaggacattccaaaagactgggggcccttcccaggcctcttctttccgcctattattttaacaaagtccatgctgccagaaggcaagcctacctcgaaacacctggcacattcacaagctaccaaagggaggagggtgaacaggctctgatacttggagtagaggcccaagcttcctctcccacggttttccaccgggaacgaagacaaagccaagccctgtgcagccacaggaagtcccaggaagcacctgtgaga

SEQ ID NO: 1556 - protein, 62 aa, Homo sapiens [sequence omitted]

SEQ ID NO: 1557 - DNA, 609 bp, Homo sapiens
tacaattttatactatcaatgagtataggtaggtgaaaattagtgttgccagaaaaaattcaaaccagaaaactgaaagtatagaaaaatactttttgtcattgaaaaaccattttaaaataatatatcgtgtagaataaaaaattccatgaatatatacatgtaaattatacatatatgtgaatttaattttgttaaaaggtaattggcatctgcaatttcatgcagtctaagtgaaacccataaagaaatgtgtatgaaataggaaagcaacaaaagctcataacattttaaaattagaaatcagattcaaaacccatcatgatctattttaaatttatctctataacatttcaattgagacataaaacacactttatacaacatgcctcactattttattaacagcatgacttccctttccccaatccccaaaccatgttcccatctacaccccaccccacccaaatctcacctcttccattagcattattacaaacatattttacaaatcttataccaagcttttccagtctcttttcaatgtagaaatatcttatatataaacccaaataccacaaatcttcacatttatattttctaaagcag

SEQ ID NO: 1558 - protein, 55 aa, Homo sapiens
MYNLHVYIHGIFYSTRYIILKWFFNDKKYFSILSVFWFEFFLATLIFTYLYSLIV

SEQ ID NO: 1559 - DNA, 657 bp, Homo sapiens
agatctctgagtccctccagttctcaagtttaaggactctactaccatggagaaggccatcagcatttgggagtcaaagaatttcttttttgaacttgagcctctgccaggggccgtggaagctgtcaaggagatggccagcctacaaaacactgacgtcttcatctgcacaagccccatcaagatgttcaagtactgtccctatgagaagtatgcctgggtggagaagtactttggccctgactttctggagcagattgtgctgaccagagacaagaccgtggtctctgctgaccttctcatagacgaccggccggacatcacaggcaagtggcctgcgacaggggccgagccaacccccagctgggagcatgtcctcttcaccgcctgccacaaccagcacctgcagctgcagcccccccgccgcaggctgcactcgtgggcggacgactggaaggccattctggacagcaagcggccctgctgagctggactgtgcttcgggctcctctgtggggctctgacctcagggctcccagctcggggcctgtggggccagtatgctggtctgggagtccctcctagactcctgggccccatgacctcctgctgcatgtcccttcccttccccagccctgccaggccttaacctgatca

SEQ ID NO: 1560 - protein, 146 aa, Homo sapiens [sequence omitted]

SEQ ID NO: 1561 - DNA, 782 bp, Homo sapiens
caattgcactgctttattgcatacagctcaactccaagacaagcaaaggcccagataatgaacaattatttatgacaaattattacctttacatataagattaacaatttctattaagctcagtataggtgacaacctctcttagaaaaatgtgtgtgcagttcaggaagtgccagcttgaaggtgaggtatggagggtgctgcgtttgtgggtgcacctgctggctgttccggagggtgtattccaggccaaggggagcccttggctgatgggcatgagctgtcaggccactctttctcccaaaggcagccatgttcccgtctcagcttggaggctggcagttttgatggggcttccagctttcttcatctccttttgaatgtataataatgaaagcaattttcttccttttggtgtatgagctagcatttctgcccgtgacaatgtactcactgcaacaagaacaaaaagcaaattagctgttcaaactatggaggtgagaatttttggatcttcctctgcttggaatgacgggaagtgattcagccaaaatgtgcaggggtgggatctggatctttgggacagacgtctgcttcagcactgagtgccccatctatgggtgagagatgcctctgcagtgtcccaggcagatgtgaaggtggaagactgcctgcaggaacagaagtcagggtcttccaggctgtcatttcatactgaggcttggtctactgagtggctttgcctgcccagaacctatggacttaggagccatagggtcgac

SEQ ID NO: 1562 - protein, 76 aa, Homo sapiens
MCVQFRKCQLEGEVWRVLRLWVHLLAVPEGVFQAKGSPWLMGMSCQATLSPKGSHVPVSAWRLAVLMGLPAFFISF

SEQ ID NO: 1563 - DNA, 467 bp, Homo sapiens
  misc_feature (432): Wherein n is one of a or t or c or g
tccggaggctgcgacatcactagccttatcttttaatgttgttaattctagcagatgaggtatgggtatgtggaagccgcttttcttctgaacctaagcaacagctgtaggaaccatttagccaggaggatcatcaaaccacagatgacccctttgggacccctgagagtcaggggagcactcatcacttcattatgtcctcaacacatcctaggctgagcaaaggttctgaatgaagaaatgcagaggttgcttggacttagcccgggttgtggaggagacacttcttcctttctcatcctcacaaggggtccttactctggccctacagcagcagcactagaggatctgtccagagcaagggcctactctttctcccttgctcctggtctcttcccatagagcctccaggctggagtggtgatgggtggnttcaactgctcctgttaccgtctctgtctgagtca

SEQ ID NO: 1564 - protein, 54 aa, Homo sapiens [sequence omitted]

SEQ ID NO: 1565 - DNA, 308 bp, Homo sapiens
ggatcccgccattgttcagtcttccctgggtgctgcctccgcctcgcccttccagccgcacgtgccttacagccctttccgagggatggcgccctacggcccgctggcggccagctccctgctcagccagcagtatgccgcctccctgggtctaggagctggttttccatccatcccagtcggcaagagccccatggtggagcaggctgtgcagactggttctgctgacaacctgaatgctaaaaagctgttacctggcaagggcaccacagggacgcagctcaacggtcgtcaggcccagccgagca

SEQ ID NO: 1566 - protein, 74 aa, Homo sapiens
MAPYGPLAASSLLSQQYAASLGLGAGFPSIPVGKSPMVEQAVQTGSADNLNAKKLLPGKGTTGTQLNGRQAQPS

SEQ ID NO: 1567 - DNA, 379 bp, Homo sapiens
  misc_feature (77)..(379): Wherein n is one of a or t or c or g
gtctgctccaatgaggatctccctgaagttgagctgctgagtctgctagaagaacaactaccacagtataggctaanagtagacactctctttctatatgaaaatcaagactggactcagtctccacaccagcggcagcatgcatctgatgctctctctccagtccttgctgaagagactctccgttacatgattctaggcacagacagggtggagcagatgaccaaaacttacaatgacatcgacatggttacacatctcctgccagagagggatcgtgatctggaactcgctgctcgaattggacaagctctcttaaagcagaaccatatcttatctgagcagaacgaatccctggaggagcaactgggacaagccn

SEQ ID NO: 1568 - protein, 126 aa, Homo sapiens
  VARIANT (26): Wherein Xaa may be any one of Arg or Ile or Lys or Thr
VCSNEDLPEVELLSLLEEQLPQYRLXVDTLFLYENQDWTQSPHQRQHASDALSPVLAEETLRYMILGTDRVEQMTKTYNDIDMVTHLLPERDRDLELAARIGQALLKQNHILSEQNESLEEQLGQA

SEQ ID NO: 1569 - DNA, 314 bp, Homo sapiens
ggatccagtcaatgttgtggtttcctgcttggacctttgggcccagctcctggcttttcttcttgtggcctatgtgaatgctacactcagaaaatgctgagacctctgtttcttctgtagaaaggcagatgaaaaatgcctccctctgatgagtgctttggggaaaaccgtaagaaaccatgtgtgatggccactggcccaagataggcacctgcaataggacccaaagatgacgagttcccgtgtgcacttctgcctccccgaagctcgtgtcccagattgctcacaagggggacctcagatgcaaactcgag

SEQ ID NO: 1570 - protein, 60 aa, Homo sapiens
MVSYGFPQSTHQREAFFICLSTEETEVSAFSECSIHIGHKKKSQELGPKVQAGNHNIDWI

SEQ ID NO: 1571 - DNA, 371 bp, Homo sapiens
  misc_feature (1)..(369): Wherein n is one of a or t or c or g
nctggaggacccaagtccagcacccaaggaataggagaggaggccaaatgggccactatccgcgtctgtggctgtcacctagggagaggctggggaatgctagtattgattttggagttacaaataaattttcgagattaagtgaattcacaaataatgaggaccaactgtacttagaaagaagaaagggctgtgacctcaaattccaggcaaatggaagccactaaagcacttcaaggaggagtgccagaatatgacctatattttgtgaagatggctattgcagtcctttggaaagcaaagatcacgcagattggacagtgaggaggcacttatgggcatccaggagatgacactgctttgatggtnac

SEQ ID NO: 1572 - protein, 59 aa, Homo sapiens
MGHYPRLWLSPRERLGNASIDFGVTNKFSRLSEFTNNEDQLYLERRKGCDLKFQANGSH

SEQ ID NO: 1573 - DNA, 315 bp, Homo sapiens
gggcccgtgggaagaagatatttgaataacgtgccacaagtccaaatccaccacctctacagagctctttgcctttgggcatgtctctttgcttctgattcccatcactttttctcttttcttttactttgattgactgttccaatagccctatcagcattgtgggacttaactgagtagcagaacctggaaacacctcattgcatctgaaacctagagaagacgctggatgtaagacacatacttacagcaacagccactgacaaggtgagcactctgatggatacctgagtgaagaagagtatggagcgtgtc

SEQ ID NO: 1574 - protein, 53 aa, Homo sapiens
MLIGLLEQSIKVKEKRKSDGNQKQRDMPKGKELCRGGGFGLVARYSNIFFPRA

SEQ ID NO: 1575 - DNA, 269 bp, Homo sapiens
  misc_feature (1): Wherein n is one of a or t or c or g
ncgtacggcggggctccgtatagagcctggtgtgtcctctgtgaatactaggaatgacatggagggcaggtcagggaggaagccaggtcacccaggcttcccccaccccccgccaagccaatccctggacctagcccagtgggtggagggcaggtctggcaggaaggtaggtcacccaggggcgcccccgccaagccaagccccggacctagcccactgggtgtcaggaacgtcaggacccgcagggctggggagagatgagctccgga

SEQ ID NO: 1576 - protein, 67 aa, Homo sapiens
HGGQVREEARSPRLPPPPAKPIPGPSPVGGGQVWQEGRSPRGAPAKPSPGPSPLGVRNVRTRRAGER

SEQ ID NO: 1577 - DNA, 326 bp, Homo sapiens
  misc_feature (1)..(217): Wherein n is one of a or t or c or g
nnaagacagnnctgaccccccttggtaggggctaatgcagctggtgacttaagttgaatccangtgtccatctgccaccccgaaaatcccaaggcccctaagaatgacgcggaatctcctctgcctgtgcgccacccatggagcgacaaagcccggatgacggcacctctgttcacagcatggtttaccgaaggttttaagcccaccattgagactntaactgctcataaaaagagccctttaataatattactgctcacggacaatgcacctggtcaccccacgcaggtacaaacactgtttttttagacacattgctggtgcac

SEQ ID NO: 1578 - protein, 83 aa, Homo sapiens
  VARIANT (2): Wherein Xaa may be any one of Gln or His
  VARIANT (54): Wherein Xaa may be any one of Leu or Ile or Val
IXVSICHPENPKAPKNDAESPLPVRHPWSDKARMTAPLFTAWFTEGFKPTIETXTAHKKSPLIILLLTDNAPGHPTQVQTLFF

SEQ ID NO: 1579 - DNA, 466 bp, Homo sapiens
tcatgacctctgttagattctcaaaagaattcagaacttcaatttaagaatcaccattttaagaatacatgtgtacatatacacattaagcagtataaagcagctaaaattggcattggttttacactggtgcagtgtgcttaggtaaagtaacttcttccatgtttcaaggtcaggttcagagttgaatgaagtgtagatttaaatttaggattaggctttggaatatatcttgtttttattgtctcacatttctgatattgactacttatcccatattctgtttcaaattctttatcatatttcaagttctttctcatacttcttgatcttggcttaactaagtaagttagtatcagagactagttgactgaacccaagattaaacattttgcacttgcacaaaaccttcttagcattttgctttcaatgaatcaaagtcaattcactaagagacagatcatga

SEQ ID NO: 1580 - protein, 59 aa, Homo sapiens
MRKNLKYDKEFETEYGISSQYQKCETIKTRYIPKPNPKFKSTLHSTLNLTLKHGRSYFT

SEQ ID NO: 1581 - DNA, 385 bp, Homo sapiens
  misc_feature (1)..(385): Wherein any n is one of a or t or c or g
nnntcgcggcaaacttcattgttgttttattttaagaaatcgacacagctacccctgccttcagcaaccaccaccntaattagtcagcggccatcagcattgaggaagacccttcatccagcaaaaatagtctgtgaaggctcagatgatcagtagcattttttggtaataaagtatttttagttaaagtatggatgtgtttatttagacataatgcaatctcatacttactagactatactatagtgcaaatataacttttacagacactgagaaaccaaaaaatttgtgtgacatatcttattgcagcatttgctttatgatggtggtctgggactgaacctacaatatctccaaggtatgtctgtggttggttttaatgtan

SEQ ID NO: 1582 - protein, 51 aa, Homo sapiens
  VARIANT (1): Wherein Xaa may be any amino acid as described in the specifications
  VARIANT (26): Wherein Xaa may be any one of Ile or Leu or Val
XSRQTSLLFYFKKSTQLPLPSATTTXISQRPSALRKTLHPAKIVCEGSDDQ

SEQ ID NO: 1583 - DNA, 469 bp, Homo sapiens
  misc_feature (196)..(401): Wherein any n is one of a or t or c or g
tccagcctctctccgaagtacaatcttggatttgtggatgagtttttagatacaacaccaaaagcataatccatgaaagaaaattttgataaactataatttgcttaaatttaaaacttttgctatgcagaagacagtattaaaagaatgaaaggaaaagacatagactgggagaaagtatatggaaatcacattngtgataaaagaatagtattctgaatatatagagaacccttaaaacccgacaagaagaaaataaataatgtaaattaatatttggcaaaacatatgaacagatatctcaccaaaaacnatacaaacataacaaatacccatatgaaaagatgctcaacatcatttgtcataaaggaaatgcaattgaaaaccccaatgaaatatnnactacacactattaaaatagctaaaattataaaaattgatgatactaagtgttggcaaggatgcgcgc

SEQ ID NO: 1584 - protein, 65 aa, Homo sapiens
  VARIANT (14): Wherein Xaa may be any one of Asn or Asp or His or Tyr
  VARIANT (43): Wherein Xaa may be any one of Ala or Arg or Gln or Glu or Gly or Ile or Leu or Lys or Pro or Ser or Thr or Val
YLAKHMNRYLTKNXTNITNTHMKRCSTSFVIKEMQLKTPMKYXLHTIKIAKIIKIDDTKCWQGCA

SEQ ID NO: 1585 - DNA, 404 bp, Homo sapiens
  misc_feature (1): Wherein n is one of a or t or c or g
ntcacacattcatgacttatacatattaaatcattacacataatcataaatatgcatatccaagctttgttggattcatacattatttgcaccctttcacagtggcacacaaagacatcaaaaggaccatacacacccatgtatacacacttttaacagatactacgtgcatgatgtgatttatcattcatggtcacacaaaacaacacatgcaaagcaaaatatgtcaccacagagacatccattgatacatatgtgcatacacactttcagaatactcaactgcacatgctcatctgcacggagcagacctttccccactgtgttatccttacttccagaagcatttatgtgaacactaacataccctcccaaatccgtatatttagtcacactcagaggtg

SEQ ID NO: 1586 - protein, 71 aa, Homo sapiens
MVTQNNTCKAKYVTTETSIDTYVHTHFQNTQLHMLICTEQTFPHCVILTSRSIYVNTNIPSQIRIFSHTQR

SEQ ID NO: 1587 - DNA, 444 bp, Homo sapiens
gcgcgccggccacagtcgccctcgcctgctctccgggccttcttgggcccgcttggtcccaggtggacgcgagtcgagctgggcacacctgggccagcgccgcacttacctgcgggattggtgagagcgttttcgcgaggtcgcaaattccgggtgggtattgtcccctgcttttgatctcccttagtcactggttaaagtgcgaagtgtgctttatcttacatatgcctttagagggacattcttaatgcgccaatgccccgaggtggaactaaataaagggaaggcctggtcattgttactgttgagactgctgtacttaacagtcagaggaaggcagctggtcaccacgacccactcggccattcccatgctgaagactcgctctcacttcacacttgtttggactccactatgacttgctggtggcccatctcctgatca

SEQ ID NO: 1588 - protein, 56 aa, Homo sapiens [sequence omitted]

SEQ ID NO: 1589 - DNA, 489 bp, Homo sapiens
acgcgtagacattacacagccccaaactcagaagcccagttcggaacacactgtgtgtggtcagcatgttgaggatcgcaagtcacgtatcagacttcaccacatgtgaaactgcaagaatataatgctgttagcagatcaggagaagtacagcaaaaccttactgtcaagttattggcaggaaataccgatctggtttattcaatatattttgaaaggcataaagctttgttttaaggacagaaatccaatctcaagtaataaactgtggccactttgctgtttagaaagaatggatatttgaaaggataggtaggaaggacttaaaaataacaggtcaacaatttgtatgcatacatacctttaaagtggtctctttagcattgcccttgcaatcttgcttaaactcttttcttcagtaaaaactttattttcatagcttggagaatggttaactttagttcaggccaatattgatgtatcacaaat

SEQ ID NO: 1590 - protein, 59 aa, Homo sapiens
MLLADQEKYSKTLLSSYWQEIPIWFIQYILKGIKLCFKDRNPISSNKLWPLCCLERMDI

SEQ ID NO: 1591 - DNA, 394 bp, Homo sapiens
acgcgttagataagtgtcactgctttttagccactcatacattaccatttggaattctttagtatttacaacccaaagttggttctctaatctatttctcatctttgtgtgataattttacaaaatgtcctcttcatttttgaagacaaagaaacgtgaaacatccacgatcaaatgatttccccctgtgttgtattagacaaacccgaagcaaagcctccggagggcgctggagaagccgcagctgcagacaccgcgacagtctcaagacacttaagctggaagcgaatgtggcatttcaaagaggcacgaaatgcaaccggctaggaaggagggattccgccgcacggctgcggcgtccgcgggacagagacgcctaaccggaagagctagc

SEQ ID NO: 1592 - protein, 50 aa, Homo sapiens
MISPCVVLDKPEAKPPEGAGEAAAADTATVSRHLSWKRMWHFKEARNATG

SEQ ID NO: 1593 - DNA, 408 bp, Homo sapiens
  misc_feature (408): Wherein n is one of a or t or c or g
acgcgtgagcgagcagtgcagctcatgtcattgccctcattttgagagcccgggacagggtgtgatctgtccagaagcatcagctgctcaggggtgtgtccaagccaccagtgagggtattccgaccttgggcaccagagcacaccggatgatgcacccagggcgtgccagctcgctgctgccagggcagattagcgcagggggccctcctgcttccggtcccagctgtgggagcgcccacattatgggaggagaggcctgtgggctttttaaatacctcccatcccagcaggatcccctgcggcccccaagtgctgtacggtggtgccctctgctggtaacaggaggtactgctacctcttataacggaggaaggtggatcccttcacattttacgcaaaaagctan

SEQ ID NO: 1594 - protein, 86 aa, Homo sapiens
MMHPGRASSLLPGQISAGGPPASGPSCGSAHIMGGEACGLFKYLPSQQDPLRPPSAVRWCPLLVTGGTATSYNGGRWIPSHFTQKA

SEQ ID NO: 1595 - DNA, 542 bp, Homo sapiens
acatgtaatttagatgcccccgagactgattattcccacaggaaggaagcaaggatgaccataaattttctgaagctagggcactccagatttctcctcaaatccatcctgtttggattccaacatttggctccatcattctatcaatacttattaaatcagggatctgtggcaggaggccagagaacacctgatggctgagatcctctctttcaaatttttatgctttattgaatagaagatccctataaactgtctctcgagggaagcactttctcatcctctttccccatgtacacaagcaagaatctgtcctcctgaacacgagtctaacttatgggagctgagagatccaggactggatccacaacaggccgaccacgcctggcccccagcaacatggcactgcccaaatcacctacgtgcctgtcaggagcagtcaggggtgcatggctgtggtgggtaggaaggagcagaagttccaggtatgtaaaagcctaactagtaatatccatgtctcatcaacattgtagtaataatac

SEQ ID NO: 1596 - protein, 54 aa, Homo sapiens
MGAERSRTGSTTGRPRLAPSNMALPKSPTCLSGAVRGAWLWWVGRSRSSRYVKA

SEQ ID NO: 1597 - DNA, 375 bp, Homo sapiens
tagctacaaaggtggctggaaaagcaatttgtgtacattttcagcctctatagcgggagacaggatggccagcaaggaagaggggttacagaatgacagttgcagaagtaacaaggaacactgtccatatctcccctcctttttctgcaatgtctagcactcctattagactgatgttagcatttctggatcttccctccatgtctcctaaattttccttcgtatgtccatccttctcctttcctttcctactgcattctgggagaatttccctgtccaaacatctagctcactaattcactctccagtgtatccactttgtaattagcatttattattttattttaaaaattacatttttcattttcaagatct

SEQ ID NO: 1598 - protein, 67 aa, Homo sapiens
MTVAEVTRNTVHISPPFSAMSSTPIRLMLAFLDLPSMSPKFSFVCPSFSFPFLLHSGRISLSKHLAH

SEQ ID NO: 1599 - DNA, 352 bp, Homo sapiens
tcgcgactcttgttgttttcccagtgtttaaggggtggaaactgtaactgcccctccaaacactcaactcgtcatcctttgaatgattctttttcatttctactctgcttcttttcggaaaataaagatagactcttgtcaaatattgagggactccaaccatcacccccgaggcaggcaattccagctccgtggctgcattccctcctctgtgtggctatgatgtggtttcctttgttgccaatctagttacatgtcacatagactaaaatcctgtgagtctgcctcctccccaatgtggggagagtcccagatcctctccaagaattccaagagtggcatccagagatct

SEQ ID NO: 1600 - protein, 54 aa, Homo sapiens
MVGVPQYLTRVYLYFPKRSRVEMKKNHSKDDELSVWRGSYSFHPLNTGKTTRVA

SEQ ID NO: 1601 - DNA, 336 bp, Homo sapiens
  misc_feature (1): Wherein n is one of a or t or c or g
nacgcgtcctgcgcgctcctgtaccccatgcgctgggagcacgtgctgatccccacgctgcccccacacctgctggactactgctgcgcgcccatgccctacctcattggagtgcacgccagtctcgccgagagagtacgagaaaaagccctggaggacgtcgtggtgctgaacgtggacgccaataccttggagacgacctttaacgacgtgcaggcgctgcctccagacgtggtgtccctgctgaggctccggctcaggaaggtcgccctggcccccggggaaggggtgtcccgtctcttcctcaaagcccaggccctgctcttcggggggtac

SEQ ID NO: 1602 - protein, 112 aa, Homo sapiens
  VARIANT (1): Wherein Xaa may be any one of Asn or Asp or His or Tyr
XASCALLYPMRWEHVLIPTLPPHLLDYCCAPMPYLIGVHASLAERVREKALEDVVVLNVDANTLETTFNDVQALPPDVVSLLRLRLRKVALAPGEGVSRLFLKAQALLFGGY

SEQ ID NO: 1603 - DNA, 370 bp, Homo sapiens
  misc_feature (1): Wherein n is one of a or t or c or g
ncactcactttatctttatatatgtttgaaattttccataataaaaaaaatttaaataaacaaaaaagaaaatacatgcttgtggtccagaaccacagactattttttattccaaaaggctgagtagattctgtttagaactgaacatgatatatagaaaatgcagccttttgtacaacctaattaattcacttgctccacctgtgaaaaaagggaaaaagataagagacttctggatttccccggtggttcctaagtggtcttacaggctaggtgttcaagagtccacggctgtagcagtattattagcgcctcacctttcaagatgttcctgccggcttcccgcggcctgaacctgcatcacggtacc

SEQ ID NO: 1604 - protein, 68 aa, Homo sapiens
MIYRKCSLLYNLINSLAPPVKKGKKIRDFWISPVVPKWSYRLGVQESTAVAVLLAPHLSRCSCRLPAA

SEQ ID NO: 1605 - DNA, 316 bp, Homo sapiens
  misc_feature (316): Wherein n is one of a or t or c or g
agatcttcaggtgcatctaatgaggatcaagccaggggtacaataggttgactcagtgctggagagttcagaggacagagtccaggctggtcacatggcttcccagctgggcgagatctggcagaccgtgtgggctgtgttctcttcctctccttgtgcattcccagtctcccttctctgtcgtgctttgttcacggttctctctcatctgcagcaggaacctttattgaatattctgacctcattctctgggtattgctcccaagatgtcactgcaaagtctgtgtaaggagcgggagacgacggaatggctgcn

SEQ ID NO: 1606 - protein, 64 aa, Homo sapiens
MASQLGEIWQTVWAVFSSSPCAFPVSLLCRALFTVLSHLQQEPLLNILTSFSGYCSQDVTAKSV

SEQ ID NO: 1607 - DNA, 523 bp, Homo sapiens
cggccgctttgaacccctcttcacagtctttctcagaaactcatttcatcactctccccatgggcttttgtttttcagttctttttagaattccttctgcttttcaaaacttgggactttttatcttcacgggaaatctaacgtgtaggtgaactatcttctttaaccctgaatgcatctcaggaaaagggtatcatgccactattgcagaatgggaagctgccctgtcccaggtacatgtatacccctgttgggctgacaacagctctcacatggaggaaaagattcagttccctcggtcagatccaactgtggccactccgtgcttttaacattataaaatcacctgcacaactattaggcttccaccacctgctgtgcctagaatcagcccctcttcatcaatatttaggctctgctcttgttggtagatttcgggtccagctttctctgtgctcaaagtgccctcttcttgtgctcagtttcccctccttagccactcgaagaccaacaaaaggaattc

SEQ ID NO: 1608 - protein, 109 aa, Homo sapiens
MPLLQNGKLPCPRYMYTPVGLTTALTWRKRFSSLGQIQLWPLRAFNIIKSPAQLLGFHHLLCLESAPLHQYLGSALVGRFRVQLSLCSKCPLLVLSFPSLATRRPTKGI

SEQ ID NO: 1609 - DNA, 531 bp, Homo sapiens
gggatttttcgcctacaatgcccaacttttaaagttagcattttggaggagactaggcgctttggaaatgtcttgttaaagctaaatgtcacttcatccaaaaatgaaaactcgagatgatgccacctcagttcaaaatctctctgcttatgtgtgactcccagaaggacatgcgtctgttcccctggctctgctatttttcagtaagatttgctttgctaaaatcagaggaatgaaaaacattgcatagaatgtcaacagagttcattgatcacccttgcatcaaaggacatgcatgcaggaggaacaaagtcatccagtccaaccttagtcgggaaggcacctgcccgtcagagagctcacctggggactcctgttcccctctctttttagggcctggctgtggcataatcttaaagtagtcagccgaggcccacagcgatctctttgcagcctgtgtaaactggtcatgagctgcacgcctgatgctggccctggcgaaggagggagatggggtatgagagctggcca

SEQ ID NO: 1610 - protein, 56 aa, Homo sapiens
MSTEFIDHPCIKGHACRRNKVIQSNLSREGTCPSESSPGDSCSPLFLGPGCGIILK

SEQ ID NO: 1611 - DNA, 1202 bp, Homo sapiens
cggccgcggcgcgaccccagccggtgccgggacagccccgcagcctgggccgccgctccccctccccggagcccggaatggatccgtcccggaaataaataaataaacccgcggctgctccgggtgtgtgctgcgcgcacctgaggccgacctgtgattcaccgcgggagggatggcagtgacaacgctccggggaagtccacagtgactcctccgccaggacgccgctggttgtataggaaaagcacgcggacgggaagccacactcaccgaaaacctcagtaaactaaatttatgagtttacatctgttccatcaatgaccacggtgcacacctgtttggcttcatggccggcaactacagatctaggtatccaagatcaagagggacaattacatattataagccgcacagagaagagtaatcaaggtggacatgaacttgtgctatataagttatgggttgaagaactctgtggaaagtagagaagaaaaaatttagggaacaagcagtagttgaatacagctatgtgaaactatgagaactatgtgaaagagtgtttggatccaaagatgaaagagctgacacaagagtggattttctgagagctgtttgagcagagaaaacttgaaggagatacactttactggggagtgaagttctttcagctttattgtggagtgaagcctgctgcacataatggagaacactggcccagtcactcaaatcacaaaggctatttcgtatgtgcttcaaagatataagacaggggttttgatcaaagccacagacctgcattcctgctgtgcctccattcctgaataccacagactctgcccagtttgcttgaatgaattctgagctgccacatgcctcagtgagacagtgaaaacttcaactcatcaatgactgggtcaaaccactctgaagacaagcagctctcccacatgctcaacactaggactatttctgaagccttgatgagaataactgacttcctgaagggaaagtaaggagcctaaacctgattatgagcaaggaggtataaggaggggcaggtgcggtttgaaaaatgcttctgtgaatcctagagaagaggcaggatccaaggccatttaacaacgtgaaggtcctagaaacttacctttgggagccccatctgacatactaccaaacaaattaaaacacaccaacatcccaca

SEQ ID NO: 1612 - protein, 90 aa, Homo sapiens [sequence omitted]

SEQ ID NO: 1613 - DNA, 337 bp, Homo sapiens
tccggactctggttgagaaggtacggaaaaagcaaaaaggcagaagaattgtctttatgggttccacgaaaattgctaatgactgttgaatctgctaaaaattcagtgttggggcccttatattctcaagaccgaatccttcaagccatgggaaacatcacactggcctttcatttgctgtgtgagcgagccagccctaactccttctggcagccctatatacaaaccctccccagtgaatatgacgctcctctctactttgaagaagatgaagttcggtatcttcagtccacacaagctatacatgatgtcttcagccagtataaaaacacagctc

SEQ ID NO: 1614 - protein, 112 aa, Homo sapiens
SGLWLRRYGKSKKAEELSLWVPRKLLMTVESAKNSVLGPLYSQDRILQAMGNITLAFHLLCERASPNSFWQPYIQTLPSEYDAPLYFEEDEVRYLQSTQAIHDVFSQYKNTA

SEQ ID NO: 1615 - DNA, 1617 bp, Homo sapiens
atttttaccgagccgcccatctctgctcagcttttggcttttctccgagtattctgtatgactgaagaagaactgaaagaacacttgctgggagacagcgctattgatagaatcttcaccttggggaactcggaatttcctgttagctgggacaacgaggtcaaactttggacatttcttgaagatagagcctcacttcttttaaaaacatataaaacaactattgaggaagataaatccgtcttgaaaaaccacgatctttctgttcgtgcaaaaatggccatcaaattgcgcttaggtgagaaagagattttggaaaaagcagtaaagagtgcagctgtcaaccgggaatactatcgccaacagatggaggaaaaggctccgcttcccaaatatgaagagagtaaccttgggctgttggagagcagcgtgggggactcgaggctccccctggtcttgagaaacctcgaggaggaggctggagtgcaggatgccttgaacatcagagaggcaatcagcaaagcaaaggccacagaaaacgggcttgtaaacggtgaaaactctatccctaatgggaccaggtccgaaaatgaaagtctcaatcaagaaagtaaaagagcagttgaagacgccaaaggatcttcttcagacagcactgctggagttaaggagtagctcgaggtgaagctggatgggggatccagtggagcaggagttgacggacagtccgttcacatcgctgtgtttccttgttaacatttttctttctgcagagaggaagatatgtttttgctgctttatataaaaatggtttttttaagttattttaaaaatctagcttccctttttgattaagattgccatcttgcttttaggcaaaacaaaccaattaacaaacaaccacaagaaagggagaagaggtgcctgtgggagattttgcagacctattgtgggtataggtattttcttcctggggaagaattcagttcccgtctcagctgtacttttgtgggcctgtcatcttgatgaccagaatgaaagcttgctctgcctcctgccagccagaattggtggcgggacttggggatacagcgtgaaggtggggaagttgcacagcagaaaacagaattgaagttgggaaactctagagtctgggcaaaatgtttggttttttctcttaaaaaaaataacaccccattaccaaaagaaaaggtaaggtggcaaccttatttttaatagtttgaaatgatgataatcctaattatataaaaatatatatataaacacacatatatatagtgatttctaaagatttgtttacttttgtgttttgttttactgtactaagaacttgtcctttctccttgaatcaaagtaggacatgcatcatcctcctaattttaaatgttggctctgattttaaagtggtgcatttgattccagccttggtaatggagagtttgcaaacacacagcggcccacagcttcacgtggtggtgtgcagtgtgaggcagctccttggctttcctggttttcacaacaagctagagattttcaaagctacacttttgagtaaaaacccttattaaaagaaaaacatgattaataaaaaaaaaa

SEQ ID NO: 1616 - protein, 224 aa, Homo sapiens
IFTEPPISAQLLAFLRVFCMTEEELKEHLLGDSAIDRIFTLGNSEFPVSWDNEVKLWTFLEDRASLLLKTYKTTIEEDKSVLKNHDLSVRAKMAIKLRLGEKEILEKAVKSAAVNREYYRQQMEEKAPLPKYEESNLGLLESSVGDSRLPLVLRNLEEEAGVQDALNIREAISKAKATENGLVNGENSIPNGTRSENESLNQESKRAVEDAKGSSSDSTAGVKE

SEQ ID NO: 1617 - DNA, 776 bp, Homo sapiens
ggtaccaacgggatcttctcaattccttgagtgcaaaatgatcccactctctatcccgacacaactctaactccattttcctttcacgtgcccttaaaagccctcaaggcccccagccttggtgaatccaggccctctctcggggtgggcaccgcgctgtacggacagacgcgcgcacgcagcgggacgatttatagaattaaaagtctttttttttttctggcttcgcatccttgcaaatactcaatattcctgtcaactaagaaggctaagggaatgggcggttgaggaaagcaggacgtcgattacagcgaacacatcaaaggggtggtctttccaattccggcttttgtttgagtcagaggggagcctgaggaggccaaggtctccggttctgggaaaggcgggtccatccggattctttgggctgcggagagggaggttccagccccgtgaaacaacagagggcagttctgcccctcgaggctttcctccgagagtactgagacggagacgcctcagtcgggagaaatcccggaactcggaggagtctgctgaacgccgaacaaaaggatgtggccgtcgtctcttaaacaaatacgcgaatcccaagccatgcacatttggaaggcatgtgtatgtgtgtgaaggagaaaggccaccgctgcccaccgcagccccacccagccctcggccattcaccggagagacgcgctgcggtcgggcctcggagccctcagccagccccgaacgagggaaggccagggcggggccgt

SEQ ID NO: 1618 - protein, 59 aa, Homo sapiens
MAEGWVGLRWAAVAFLLHTHTHAFQMCMAWDSRICLRDDGHILLFGVQQTPPSSGISPD

SEQ ID NO: 1619 - DNA, 654 bp, Homo sapiens
gtaccgaagatcctggcagtgggaactcagactggtgctttaaggctctttggtcgtccaggagtagaatgttattgccagcatgacagtggagctgcagtaatccagctccagttcctgattaatgagggagcgcttgtgagtgccttggctgatgacaccttacacttatggaatttacgtcagaagaggcctgccatactacattcgcttaaattttgcagagaaagggttacattttgccatctgcctttccagagtaagtggctctatgtgggcactgaacgaggtaatatacatattgtcaatgtggagtccttcacactctcaggctacgtcattatgtggaataaagccattgaactgtcatctaaatctcacccaggacctgtggtccatataagtgataatccaatggacgagggaaagcttttgattggctttgaatctggaacagtagttttatgggacctcaaatcaaagaaagccgactacagatacacatatgatgaggctatccactctgttgcttggcatcatgaaggaaaacaatttatttgcagtcattcagatggcaccttgactatatggaatgtaaggtcccctgctaaaccagtacagacaatcactccacatggaaaacagttaaaggat

SEQ ID NO: 1620 - protein, 218 aa, Homo sapiens
VPKILAVGTQTGALRLFGRPGVECYCQHDSGAAVIQLQFLINEGALVSALADDTLHLWNLRQKRPAILHSLKFCRERVTFCHLPFQSKWLYVGTERGNIHIVNVESFTLSGYVIMWNKAIELSSKSHPGPVVHISDNPMDEGKLLIGFESGTVVLWDLKSKKADYRYTYDEAIHSVAWHHEGKQFICSHSDGTLTIWNVRSPAKPVQTITPHGKQLKD

SEQ ID NO: 1621 - DNA, 939 bp, Homo sapiens
tttttttaggaaaaacatttgtattaaatctgaccaacaataactagttttgaatacaatgttttatacagataagttaaaataaacaaaaaaaaacagtatgactccaatccaaaaggacagtgacacaaacaggcaaagtatacaagcaatataacaggcagcgaaaaattcaaaccactagtcatcaaacaaaagtaaaattttagacctattaacctcgcaaaaaaaagcaactgaaattccaccaccaccatcagtagttgtagtaaaattaatccactcattcaccgctaaagatgatctaaattggtgcagcccttgtgcaaagcatcatgacgataaatgtcaaaattcatgagcatgatcatttctgtagaccagaaatctcactcctaagccccatatcaagaataaaattcaaccaaagaataacttcatgcttaaaaatgcttactgccgagttatgagcaagcaaccaaatgccaagctctgttatttgatataaaagaacttgatcaaataaatatacaaccatgaaatgtatatttaagtataaaatacaaattgtggtatgcacaccaactaaaatttctgaaaatacgtaagcacaggaaagggaacatacaataaagaaaaaagaagttatgatattccaacaaatgtttaattacttgatgctgatacagtatttttttaatttaaaatgagacaaatcctttgtgtcttttgaggtttccttttaagctacatgcctattattatctaaagaataacttcttaaaaataaaaataaaagaataatttaacaactatacacacagggacaagccataagctgcaccaactggatcctagatcctcttttcccaagggcagcccattcttggttctttcatagccctgtacaatgctgcttgacctgaatgctacaaggca

SEQ ID NO: 1622 - protein, 87 aa, Homo sapiens
MSGLILLQLLMVVVEFQLLFFARLIGLKFYFCLMTSGLNFSLPVILLVYFACLCHCPFGLESYCFFLFILTYLYKTLYSKLVIVGQI

SEQ ID NO: 1623 - DNA, 516 bp, Homo sapiens
  misc_feature (1)..(9): Wherein any n is one of a or t or c or g
nntatgganacatccatcgaaccaaaagcaactgaaacttctcacacagagggaattactgccattgaggagagctgggagtctatgtttaacgatgatggtgactgcctggatccacgtcttctacaagagttatcagggaataccaagagcagagagagcatccaggaacctagatctgattactacaatcatgaagttcctgatattgacctcagtgattgtgaattcccacatgtcattgaaatttatgactttccccaagaatttcgtactgaagaccttctacgggttttctgcagttatcaaaagaaaggatttgatattaaatgggtggatgatacacatgccctaggagtattctccagtccaattacagctcgtgatgcgttgggtattaaacacaccatggtgaagattcgtcccttgtcacaggccacaagagcagccaaggccaaagctagagcttatgctgagttcctccagccagcaaaggagcgtcctgagacttcagca

SEQ ID NO: 1624 - protein, 172 aa, Homo sapiens
  VARIANT (1): Wherein Xaa may be any one of Ala or Arg or Asn or Asp or Cys or Gly or His or Ile or Leu or Phe or Pro or Ser or Thr or Tyr or Val
  VARIANT (3): Wherein Xaa may be any one of Asp or Glu
XMXTSIEPKATETSHTEGITAIEESWESMFNDDGDCLDPRLLQELSGNTKSRESIQEPRSDYYNHEVPDIDLSDCEFPHVIEIYDFPQEFRTEDLLRVFCSYQKKGFDIKWVDDTHALGVFSSPITARDALGIKHTMVKIRPLSQATRAAKAKARAYAEFLQPAKERPETSA

SEQ ID NO: 1625 - DNA, 865 bp, Homo sapiens
  misc_feature (843): Wherein n is one of a or t or c or g
ttctacgggcctggtccttggtttctaccccagtcccttttggccggcacctgcctggaactgcctggagcgccatggtatggggaaggacaggtggaaccctgaccacaacagatctttctaaaacaataaagtcccattgatgacaactgcagtgggatgaatgccattgcagcggtcatgctgggagctgccgagagcttacaacaaaagcagttcttctcaagacactgcttgcatctttcctccacgcctctcggtgcatttggaacttgtttatgcgctggtataactcgagtcagctgcttatttctgtgcccttgcactcacaggttccttcattaacattttaaataagtggctaaaaaaactcctctggaggttgtttttgaaagagacaggaaaaagaaacacacagtacctggattgttttgacttattttcaagcgactcagctgaaagccggtgttgcatacacaatttcctcacgctgacccagcctgactaagacttgataaaaggcacagcccttggcagcaggcagtgccaatgtggacagtgtacactaagctgtgagtgtgtgcacgggcgagcacatgtatgtgtactcatacatccagatgaactaaagggacactgggctttgtgctggcaaaggttacgatgctgctgtagcttggctgtgggccccaggcagtgtcagatggaacctgctttgatggcgtgttgttcagtgtactcagtggggtctcacatggcccgaggacccactgtgagcactccgcccgctgtggcacagaacacggctggggtcatcacagcccagggctttatttgaaaggnggctcatatagaacccatttgg

SEQ ID NO: 1626 - protein, 61 aa, Homo sapiens
MNAIAAVMLGAAESLQQKQFFSRHCLHLSSTPLGAFGTCLCAGITRVSCLFLCPCTHRFLH

SEQ ID NO: 1627 - DNA, 574 bp, Homo sapiens
gaattcttgccccagttgctgggtgaccacactctgctaactcccgggtactcggtgataattgaaaaactggcagaagggcttgacattcaactcaaatctccagtgcagtgtattgattattctggagatgaagtgcaggttaccactacagatggcacagggtattctgcacaaaaggtattagtcactgtaccactggctttactacagaaaggtgccattcagtttaatccaccgttgtcagagaagaagatgaaggctaccaacagcttaggcgcaggcatcattgaaaagattgccttgcaatttccgtatagattttgggacagtaaagtacaaggggctgacttttttggtcacgttcctcccagtgccagcaagcgagggctttttgctgtgttctatgacatggatccccagaagaagcacagcgtgctgatgtctgtgattgccggggaggctgtcgcatccgtgaggaccctggacgacaaacaggtgctgcagcagtgcatggccacggtccgggagctgtttcaaggacaggaggtcccagatcccacaaagtattttt

SEQ ID NO: 1628 - protein, 191 aa, Homo sapiens
EFLPQLLGDHTLLTPGYSVIIEKLAEGLDIQLKSPVQCIDYSGDEVQVTTTDGTGYSAQKVLVTVPLALLQKGAIQFNPPLSEKKMKATNSLGAGIIEKIALQFPYRFWDSKVQGADFFGHVPPSASKRGLFAVFYDMDPQKKHSVLMSVIAGEAVASVRTLDDKQVLQQCMATVRELFQGQEVPDPTKYF

SEQ ID NO: 1629 - DNA, 938 bp, Homo sapiens
  misc_feature (1): Wherein n is one of a or t or c or g
nactgtaggaattttgaaagtgcaaaaggccaacccaaaattctaccaacaaaggtaacctactggcatttgggtatattttttctctgggccttgtcctccgcctttatctgatgctgcagatgtaattctgtgttccgcttgtttgcttcatgttgtgttatgaacatgtccccctcaaatctccctgggagccttccagcgatcagccccgtttgactgtgtggctctggccttggggaagagctgagggtctcctgccctaacggatggtttcagggtgtgaaggtcaaaggcctcatcctcatcagcccccagaaccctctgggtgatgtatactcccctgaagagctacaggagtacctggtatttgccaagaggcacaggctgcatgtgattgtggatggggtctacatgctgtctgtgtttgagaagtctgttgggtaccgcagtgtcctaagcctggaaaggtgaggctccctgacacagctaactcccccagtccctattatcccacggagccctggccactttctggctcagcccacaggcgatggcctgcccagagcaattccatttccacccagctggtcccactggtcctcagatctaatgagaagcagggacggttgggctagattagtgattttcaagttgttctgtggaatttctgagaactccaagaagaggcctcaggatcccttaagttagggctgagtggatggcaaattggcctctttgctgtttcctttacctccagagtcgctccagttttattcattcattcatttactcattcatgctctcattcactcagcacctctggagccccttacacacagagtgtgccaaacacctatggatatttaaatgttgggctttttcattaggtttactgtaagcaaagcatttgtggccaaaatacctttgggaacact

SEQ ID NO: 1630 - protein, 84 aa, Homo sapiens
LCGSGLGEELRVSCPNGWFQGVKVKGLILISPQNPLGDVYSPEELQEYLVFAKRHRLHVIVDGVYMLSVFEKSVGYRSVLSLER

SEQ ID NO: 1631 - DNA, 649 bp, Homo sapiens
cttttttctttttgagcaagactctgtctcaaaaaaaaaaaaaaaaggaataaaaaaaaaaagcttctgatttcatctcccttttcccccacccatttctttgataagtgataattctttttctcctttaaatttaaggttcctcagaaaattttgagtaaatgggaagccagtgttggacttgcagaacagtatgatgttcccaaggggtcaaagaaccgaaaatgtattcctggttcaatcaagttggacagtgaagaagatatgccatttgaagactgcacaaatgatcctgagtcagaacatgacctgttgcttaatggctgtttgaaatcactggcttttgattctgaacattctgcagatgagaaggaaaagccttgcgctaaatctcgagccagaaagagctctgataatccaaaaaggactagtgtgaaaaagggccacatacaatttgaagcacataaagatgaacggaggggaaagattccagagaaccttggcctaaactttatctctggggatatatctgatacgcaggcctctaatgaactttccaggatagcaaatagcctcacagggtccaacactgccccaggaagttttctgttttcttcctgtggaaaaaacactgcaaaaaaaaaaaagt

SEQ ID NO: 1632 - protein, 178 aa, Homo sapiens
FFFSFKFKVPQKILSKWEASVGLAEQYDVPKGSKNRKCIPGSIKLDSEEDMPFEDCTNDPESEHDLLLNGCLKSLAFDSEHSADEKEKPCAKSRARKSSDNPKRTSVKKGHIQFEAHKDERRGKIPENLGLNFISGDISDTQASNELSRIANSLTGSNTAPGSFLFSSCGKNTAKKKK

SEQ ID NO: 1633 - DNA, 779 bp, Homo sapiens
gcgcgccctcctcccgctcctccgggttcctggtccccagcctgtggggggcttgggctgtagcgctggggcgggggctttagatcaccccgaaaacaggacctctggcgaccttctcgttttccaccgggagcggagagagccgatctccctttcctgctagccccgtaggacagtccccggagcagctcataggaatatgacgaacgtttactcagggctggttactatgtacactgcgccccgcgcgcggcgagtttacctcggttcacctcccggcaaccggcggcccggatattatcagatgctgtgggcttcccggcgcctcattgcccgaggaggggcggccgcaggtagctgagctggagctagcacaagttgaattcaccaaatagaagacattggaaatgagacccgagggttggaggaggaggaagcctgcaatgtgaacacgatggctggagctccggcagccattctggaccaggaggtagccttgaagatggaagccacatgttgggatggtgaatccaaaagatgaggagcctgtatcccctgtgacaccagaactgccataccagccctgggttcctccatctatactgccttcatatggtaaagaaatattcttggatcttgttaggtgtctgttgcagccaaacacaatcccaactgatattcactgtaaatgattccatggctccctgtagtacttctacaaagcatctatcacaattgtaattaataaaataattatgcaattaaaaaaaaaaaaaaaa

SEQ ID NO: 1634 - protein, 70 aa, Homo sapiens [sequence omitted]

SEQ ID NO: 1635 - DNA, 765 bp, Homo sapiens
gcggccgcctccggctcccgtcaggcccaggcccggccggccgaggcggcctatggttctctgtggtggacgcaggtcggcggcgtcgcatcgcagccgcctgtctgtgcacgaacggtcggtcactaggagtcctcaaggcttctctggttgagccgcacatcccgcaccccctgtcgaaacggtggagtcgctcgcccgcgggtcctcagcgagtcagtggcgcagtcgggattcgaaccgggcccaaggcgtcccgtggcaccgggcgttctccaggcgtgcagcgccgagcggtgtactgagcgctgtcccccgccaccgtctcgcggcccctgaccgcattctcggggtgtctccttgtggtgtgacaccccacgcgttttgtaggcgcggacctcgggcccagagaacggggagaggaactgttcccgggtttaccacgtagctcagcgccagcgtccgatccggccggctttccaagctcccggcgcggggcactgtccgctccccgccagcgggcgaggggcttctcttaggacggcgttgcacacgtttcagtctcgcgttgcacctttatgtccgtggaccatctgtactgctatttaccaaatgttacattttttaaaaaattcaaactgactctttttttctccttaaatatatttaaggcggcaacttcaatcacaaaccgggtactggaaagccagttatttttctaatgcttataaaaaaaataaatatctgtctgttgaaataaaaaaa

SEQ ID NO: 1636 - protein, 54 aa, Homo sapiens
MCGSTREALRTPSDRPFVHRQAAAMRRRRPASTTENHRPPRPAGPGPDGSRRRP

SEQ ID NO: 1637 - DNA, 1101 bp, Homo sapiens
  misc_feature (1088)..(1097): Wherein any n is one of a or t or c or g
ctggactactgtactgaatttgtaaatgaattgtgcctatattgttaaaattaatttgactgtattaataactgaagaaagcaatgttataaccctggtaattgggaagttattaaaatcatttaattcatctgagaaaggtaagccagttttccctttttttctttttttggttgtttttggttgcaacaactgttttctgtctacagaaccttttttaaaacttcggaggcagtagtaaaatcattaatattcacaggaaaaataattcccatagcactttacaagaaattgatcagagtgatgaaaagtgcaattaacaaaagctgtaaacagtatcttcacattcattttcaaatgaaaagaaaaatctgtgggcataaatttcaatccaagagaacaaataccctaaaagggaaaagaaaaaagaaggacatttaagatataggagtgcttttttccccccaaagtaaatacagattaaaaagtctaagaatgttgatcaagtatcaaactgataaggaacaaattctataaactacaaaataaaaaccttcattgacaaaaatacataaactctgttttcatttttggaaatttatttttaaaaaaggtagaagaaaatacctggaaaactattttaaatatatatatatatatctatattttaaaacaatagttaaggtaggcatccaacagcaaactgaagctattgagaaagatcttgcaattattgttgtgggcattttcccccaaaataaaattaatatttgaaaatgctcaatagagggtttttttaaagcatagaaatgatatctttcctgttcatgtgtgaagatttttaaatgatgtatgattttttaaaattaattgtatctcgatatgagataccagtatttcttattataagcgtaaaacataactttttgtatggataatatacatactttttaagtactttgacttaaacttaacaagttcaccattttaaaattaaagtacatttataaaaattccattttaaaactaaaagtatattttctagcagtatgtataaatataacatgttactgtatgatcttaaacanatctgaaantgtt

SEQ ID NO: 1638 - protein, 70 aa, Homo sapiens
MNCAYIVKINLTVLITEESNVITLVIGKLLKSFNSSEKGKPVFPFFLFLVVFGCNNCFLSTEPFLKLRRQ

SEQ ID NO: 1639 - DNA, 403 bp, Homo sapiens
atcttcaccagtaagtgtgaacgcgctggctgccggcagcgagaaatgatgaaactgacctgtgaacgctgtagccgaaacttctgcatcaagcaccggcatccactggaccatgattgctctggggaggggcacccaaccagccgggcaggacttgctgccatctccagagcacaagctgtggcttctacaagcactgtccccagccgtccaactgcagcctgtgctagggccttgggcttggggagggaggttcacctgaggaggactgtggccctcacacctctagggtacacagggagaggaggcccggagcaccctggagggcagagacaagcgggagtgatgtggaggtcgccctgggagcctctggaaggccttgctagtgctccagctgcatgga

SEQ ID NO: 1640 - protein, 134 aa, Homo sapiens
IFTSKCERAGCRQREMMKLTCERCSRNFCIKHRHPLDHDCSGEGHPTSRAGLAAISRAQAVASTSTVPSRPTAACARALGLGREVHLRRTVALTPLGYTGRGGPEHPGGQRQAGVMWRSPWEPLEGLASAPAAW

SEQ ID NO: 1641 - DNA, 430 bp, Homo sapiens
  misc_feature (1): Wherein n is one of a or t or c or g
nttttttgccgtacagagatcaatatatataaagtgccggtacaacgctctgaaaaatagttttgtcccaaaatccagcgcctagggtgctccgggcctagcctttgccagtgaggtccaacggctgcaggaatgggggcagcggcagctcgtccagggcctcggggaagcggcctggagagatggcggtgaccagcacctgcatggcgcgcgcgaagagcgagggcggcgccaggcccgccagccactggaacttgtcctcacccagcagccgctgccagcgcggccggtcgcccagcagctcctggcgggccgagccggcggcacccacgggggtgtacagcgccaggaggtccagcagcagctcgagaggcgtgaggccgccgccgtcccgcagaccgggcgaggcgccgtggcccagcagcaggaa

SEQ ID NO: 1642 - protein, 61 aa, Homo sapiens
PAPAWRARRARAAPGPPATGTCPHPAAAASAAGRPAAPGGPSRRHPRGCTAPGGPAAAREA

SEQ ID NO: 1643 - DNA, 533 bp, Homo sapiens
caagaaagcactctactatcagatcaatcaaagattctgtgagtgaatttattggtttgcatggtgaagcaagcttagcatcaattaaaaggtaaataatttcttttctgaatggtaaagacaatcaaaatattactttctggaaaactccaataaccaaattctcaatgattagtgtatgtgagcaggaaaacatttttacagttgtagtatggggaaatataaatccaattttaagagagaaaattatgactgggtgtggaagggacagtatagtcagataccattgtcatggtggtttttactgggaacttcatgaaagacttttgtagcaaaccactgcagtattgcaaagcctccagaacatttggaacttgtctctttttccttgtgtgtgtttgtgtttttggtctctcattcaaaatattgatgagaactatttactctgtcctttcttctttatatattcttcctctacagagtgtagggttttttcaggaatttggagccatctgaagtcctcccaaaaattt

SEQ ID NO: 1644 - protein, 74 aa, Homo sapiens
MVVFTGNFMKDFCSKPLQYCKASRTFGTCLFFLVCVCVFGLSFKILMRTIYSVLSSLYILPLQSVGFFQEFGAI

SEQ ID NO: 1645 - DNA, 303 bp, Homo sapiens
  misc_feature (1)..(2): Wherein n is one of a or t or c or g
nnaatgcaaacgccgccatcaaccttcaggatgatcccatcattcaaaagtatggctctaagaaagtgggcttgaccagatgccttctgacaaaggaggaaatgagaacgtttcactttccattacaagtgcctcacatccaaggggagagagctaacacgcatctcactggttgctgaaggaggctgctgtgttatggatgaactggtcaaacctgaaaacaagattctggactacctcaccagcttttcgggaatcacgaagaagattcttaacccagtgacgaccaaactcaaagatgta

SEQ ID NO: 1646 - protein, 66 aa, Homo sapiens
ERFTFHYKCLTSKGRELTRISLVAEGGCCVMDELVKPENKILDYLTSFSGITKKILNPVTTKLKDV

SEQ ID NO: 1647 - DNA, 555 bp, Homo sapiens
tttatttggcattttatacttaactagttgtatttatttttcatgtcatgagagtttccatataatgtgccataactgcatagacagcacgtcttcagggtgtggtttctaagcagaaaatagcaaatgtttatattgaataaaattgcatgttcctccacgcagcatcttcatcctccacgttcactgttttggaactagttgttctcctctgcacaaagcgattttatcaggctttccagagcagcttcgattccaagcagtcctaccagggttcggaagctgagaggagcagtttctatggctctgttcttgtccagctccagggctcgctgtgggactttggtgagaagatccagctttggaaaaaccttcccatcttcatctatttgtatcctccaaacaatgactaattcaaaccctggccggctggcgctgcggatccccatggagcaggaggagggcccctccgagaggtacacggcatctgggtacttttccttgagatgtttaaacgtgcgcttacgatattcaaaccactccacaaaaaaatgc

SEQ ID NO: 1648 - protein, 87 aa, Homo sapiens [sequence omitted]

SEQ ID NO: 1649 - DNA, 426 bp, Homo sapiens
ccatgggcagacaccacatccttctccttctttttcatctgtccctgcagatcttcagtcacattagttaactcttccacttttgctacagcaactctcagctctaatttggcttgccatttcaatacacttctagtccaactgctttcccaactctaaagttctgtgagtgaactatgaatatttttaaatattttccagattcatcagggaggctgcttttcttctctgcactgtaatcacactgagctgctgggaagctgaagcagctctctcttctgcctgacttagacgcctttcaagtctgttggctttttcttgatgctctagaattagcttttcattctcagctaccttttcatttgccatttccagctgagaaagcagctcttgggtatgaagtttctgtcgactcagctcactctt

SEQ ID NO: 1650 - protein, 60 aa, Homo sapiens
MANEKVAENEKLILEHQEKANRLERRLSQAEERAASASQQLSVITVQRRKAASLMNLENI

SEQ ID NO: 1651 - DNA, 812 bp, Homo sapiens
tttttttttttttcagactttgtagctgtttttattattaatattatcttctcctttaagcatccctttaagggtgaaatgaaatccaaccatttacagagaaaatgatttcagaatgtacatattgattttcccttacaaaaaaaataatactattattgatgtccttacattatgcatttcccagggtcctgccttctgcttggacaagtcccgtctccccacccagactctccctgttgcccccaaagatctcccatgctgcccctgggaaccgacgtgacccatgggtggataaggccagccatgcttcccggatgcttggcatggacaggcctccttgggtctaggggtctcagggccagttattcccggggagaaaggtggacatgggacatggcagcagtgtgccggtggtcacattcagcttggtttcccttcatattgagggagtggccctgggttcttctgcccccaccaaattcccagtgtatgctgtgatgatatgtaaaactcttcaatcctgtgccctggcccccagccctctgacagctgccctctccaccgatggccaggccttcactcctgctgctgtgaacaggacctgccccaccaggtctgtgaggaaggcagagcctggcagctctgagctgctcctatcttccttcgcttagccctgagctggtgccctggaggggcatcccatagcaactgaggatgccaggggcgtgggggtgggaaagctgccaaggagggaggccccaggccagggcctgggcatgatcaggagccctgagactccctgtccatgg

SEQ ID NO: 1652 - protein, 108 aa, Homo sapiens
MHFPGSCLLLGQVPSPHPDSPCCPQRSPMLPLGTDVTHGWIRPAMLPGCLAWTGLLGSRGLRASYSRGERWTWDMAAVCRWSHSAWFPFILREWPWVLLPPPNSQCML

SEQ ID NO: 1653 - DNA, 1425 bp, Homo sapiens
ggcacgagcagtcagtaaaccaatgtgagtcttcatctcttgcattcttaggttcatagttttgtgtgtctcctgtaatgacccttctctttccctttccaactcctgaaagattgccactatttcctctggaactttgtttcgttaccagcaaaatcctcgacatccatacccgtttcctggctttccctctcctttcctctgaatggtagtcttttatattcagctgtccacttgacatcaaaatagacattttgaactcaatttgcctaaaacttacccacaaatttctccccaagtctctccctaactgcaacaacaaaaaccacaggcttctccctgtcactggatggcaactccattcttttgattgcttaagccaggcatccgattgagtactttcttgatttctccagcccacatccagtccatcggcaagccctgttggtcctaccttcagaatatgtccggggttcagttgtcctggccaccctgctgctgtaaccatggtcagaactccatcctgcccctctggattatgactttcgtttcctcacagtggtcctgcttgggctctaggcccttccactcccattctctctacagcagctgggctgattcctttagcacccaaggatatgttggcatcacagtgacttagataccatcacaaagacctcccattcaacttagagtgaaagtcagaatcctcacagtgaatccccaggccctagaggatgtgaacccccaggccctagaggatctgaacccccatccctcctctgattatctctcccacccccacttccctttgcattctgctccagctgccctggcctcatggctgggtttccaccaaagcaggcacttcccatcacagggccatttccccgcctgtggcttctgcttgacattcccttttccctgatatccccttgactcattattccctttcttccttaactcttctgagatccagcttctcagtgataccacacagccctactccccccagagcccatctagagctcacctttccagtcgcccttgccaggctcagtggaggctctttgttccccatacagtacgtgtcgtcgtactatattgttaggcttatttaatttatgtatgttttgcctttttgtgctaaatgtaaacaccacaaggggaggtatctttgtctgttgacaatgatacattcaatgtttctcaagcacccccaatgctggtttgtatgtggttatcattcaatctgtatttgttgaatgaataaatgattgactatgtggagagcaaaattgatggacctgaaaatgttttgcaaaatgtaatatagtctactgatacaatatttattattattggccaataatgtttaatgccaagtgctaaattagtaaaattttggggatatagagaaaaatt

SEQ ID NO: 1654 - protein, 169 aa, Homo sapiens
MVTAAGWPGQLNPGHILKVGPTGLADGLDVGWRNQESTQSDAWLKQSKEWSCHPVTGRSLWFLLLQLGRDLGRNLWVSFRQIEFKMSILMSSGQLNIKDYHSEERRGKARKRVWMSRILLVTKQSSRGNSGNLSGVGKGKRRVITGDTQNYEPKNARDEDSHWFTDCSC

SEQ ID NO: 1655 - DNA, 1832 bp, Homo sapiens
ttttttttttttttttttttttttttttttttttttataaaaactcaacacacattggattttaatgagaaaataactgtatacttgcattgaatgcctcacaatcactctaaaaccaaagcaggataataacatttaagtggttaacatacacaggaaaaccagatacagagtataatttccaaacacagtattgctgcttttttcccctcctcccccaaaaaaagaaaaacaaagaaaaaataatttgggtaaagagcaacacaaaatcaaaattggcagctcactgaatgcttaaaattcaggaaatttgttctttaactaaaatggaatatattcaccatctctaacacttaggctacttttttttcaatacatagtttaattaaatccattctttagttgggaaaaaaaaggtttaattatttgtcttcagagacaagaatcaacactgttttagtgttccttgttacactttatatatatatatgtgtgtgtgtatatatatgtggacattgatctatatacggcttatatgtcattgtctagggtgagcagcatgcatgggtatgaagaggcaagtaaactgcattgtgtcatccaagtaaaacacagcacgcctcctgccactgacagaccctgtttccataatttctggatgagaaagccaagtcatgtcagtagttaatcagctctggaggaaagtgaacacctataaacacggcagaatgcaatacttccagaaaggcttttaacacctacagaatctaaacattttgtaagaggtggggttaacaagcttgtgtgctatttgggggtggggctgagcatcagaggcaaagtttttcgtaagcctctttctctcgatggattaggcaggaatgactttcctccaggggacggtcccatcttcagaaagttaaaagggtccatttgggatcccagagcctagcacggtgctatgtacaaagcggtggcccaaggtttcttgaatgaataaaaaactcaagagcacagagaaaatctggctctcccaagtaaactgtaatttacattttcatgggattataataggatcttcagtgagtggagcaagaagatagacagcagtaatccggaaggcagcataggagtaatagcaaaagttaagagatgtaggggccacagtgaaaacagctttgtgactgtgggaaaggcccagaaacagtatttctttccttatccacacacggagcatggcccaagaacccccagctctagaactctgttattctttaagcaataagtgctctggttcaatcaactgtggtcaaagaccacttcatctgcctctaaagccattccgcgaatagtgtggcctcttaagcttttctctttagctgtacattctcattgtcaactgtaggtttcatgaagcacatggtttccttcaaaacagaacaaaaaactttaaggtaagtcataaggatggtttcctcttgtgaaaaatggggaagttagtctatatcatgtctatggtctctaccagatccatgagtcagagaaaacatgaagcgcatcacattttttgggcaacccatagaactatcctactctccagccatcctaactgccactgtgcctggggctgtgcaatgctgctgcctcctctgttcttatccctgtgtctgctttgggaacgcccccttatcgctgggttctcagcccaggcatctgggacctctggctagaaatcctcaggtaaagacgatcctccttcctgagtcctcccatttcacatcaggacttctaatctaacacggatctcattttcctgagaattttagtctccc

SEQ ID NO: 1656 - protein, 82 aa, Homo sapiens
MKRITFFGQPIELSYSPAILTATVPGAVQCCCLLCSYPCVCFGNAPLSLGSQPRHLGPLARNPQVKTILLPESSHFTSGLLI

SEQ ID NO: 1657 - DNA, 390 bp, Homo sapiens
ggttcaatccaggctactgggtcatcatcaggtagagttgcactgccaaagtgatcagggtcatcaatttggagttgtttgagtttttcaacagcatcagagtgtgactgggttttgcttgaatcatcaaaactgatggcatcctggtagatgacaatgagggaatctctttggcttttgcccgtggtactggaaatggaactgttttgggagcgcctctcctgctcctcaaagaaagcactgaaagggttgataggggagggctgtacatcctgcagagtctcattcaggaaagggttggttgccctccaaggtggagcctcagttacagaaggcgtgcggtttaaagaggaaatatccagcttctgaactttggagaagttcatcaaa

SEQ ID NO: 1658 - protein, 128 aa, Homo sapiens
MNFSKVQKLDISSLNRTPSVTEAPPWRATNPFLNETLQDVQPSPINPFSAFFEEQERRSQNSSISSTTGKSQRDSLIVIYQDAISFDDSSKTQSHSDAVEKLKQLQIDDPDHFGSATLPDDDPVAWIE

SEQ ID NO: 1659 - DNA, 785 bp, Homo sapiens
aaactttcttggtacaaaaccatagtctgcaggtcaatgttcctctttattttcaatgtcataaatcatgagttaccactgagtttcatcacctcccatgtagatggcagaacaagtgtttagaaatgtttggtgcaagcaaagcagaaggcagagaaaacatttcccgactgagaggaattaagctgctcttccaaaagcttctgaaatgcacttgatttttttcatttggttgaaaatcagctatgtgaaaatgtgccatcttcgtaccttcttggtcttcctgcttcccttttactgagatggaactcgggagaagtttatgcaccggccctcatctccttcctgaggtcgcatcaaagaaacccggtcatactgccgcctcaacaaagcccagagagcatcaagacgacccttaattggggtgtaccattttgtctgaggaggctggtgtgtgggtttgggtcgaggtggtctaggcctgatgggttcctctgtttcttcaggaatcttcaccacagcatttttggctttctctagccttgcaccttcctcagtagatcctttatcaccccaacgaacctgtaaaacaaagggagagtactgttatcagacataaagtgtcctagaggaacaggctcttattgagcctatggtcctttagttcacatctcagagtgaaaaagaagatgagcaggtatcctaattcctaatttctcctcttcagaggctaaataggtttctcaccactcctgactgtatttaatattaagatccaaaaaaaa

SEQ ID NO: 1660 - protein, 57 aa, Homo sapiens
MAHFHIADFQPNEKNQVHFRSFWKSSLIPLSREMFSLPSALLAPNISKHLFCHLHGR

SEQ ID NO: 1661 - DNA, 533 bp, Homo sapiens
agatctccaccacaaaccacatcacaactctcccattactaaaaaaaattatccagaggaactgctttctgtacattttcaccttagactgaaaatccaacatacctcggaaacgagctgattggtttcaaacaagaaatttaccgataaagtttattatgtactaataataattatggaagcccactgtgtcccgctgtagggggagccgaggggaggtgaagagcaggagggtgtaatcctcacaacaaccagagaaaagccttccctgcagggttggtcccaggcaccaagcaaattctgcccaataaagggggggagggtaccttaggggaggaggggagaagggaccccaagctctaaaaggaaggggctgcagaagcatggccaagtggggctagctttcacagtattgcagagggtctgggggtccccccgcagtgctgctgccggggcaccccaaaagctccgcccaagcccgatgcaggggcttgagccgctgtccctttcctggctgggctgtggcggccgga

SEQ ID NO: 1662 - protein, 73 aa, Homo sapiens
MLLQPLPFRAWGPFSPPPLRYPPPLYWAEFAWCLGPTLQGRLFSGCCEDYTLLLFTSPRLPLQRDTVGFHNYY

SEQ ID NO: 1663 - DNA, 483 bp, Homo sapiens
  misc_feature (1): Wherein n is one of a or t or c or g
nccggccacggcggcgtcttcgcgctcacgctgctgctcatcctcaccaccaccggcctcttcttcgtctttgactgtccctacctggctcgcaagctgacccttgccatccccatcatcgctgccatcctcttcttcttcgtcatgagctgcctgctgcagacaagcttcaccgaccctgggatcctgccccgggccactgtctgtgaagcagccgccctggagaaacagatcgacaacacaggcagttctacataccggccaccccctcggacccgggaggtgctgatcaacgggcagatggtgaagctgaagtactgcttcacctgcaagatgttccggccaccccgaacctcacactgcagtgtctgcgacaactgtgtggaacgatttgaccatcactgcccctgggtgggcaactgtgtggggagacggaactatcgcttcttctacgcgtttattctctccctctcattcctgacg

SEQ ID NO: 1664 - protein, 161 aa, Homo sapiens
  VARIANT (1): Wherein Xaa may be any one of Ala or Ser or Pro or Thr
XGHGGVFALTLLLILTTTGLFFVFDCPYLARKLTLAIPIIAAILFFFVMSCLLQTSFTDPGILPRATVCEAAALEKQIDNTGSSTYRPPPRTREVLINGQMVKLKYCFTCKMFRPPRTSHCSVCDNCVERFDHHCPWVGNCVGRRNYRFFYAFILSLSFLT

SEQ ID NO: 1665 - DNA, 2458 bp, Homo sapiens
ttttggccaaagttgaccactactcttcttactctaacaagccacatgaatagaagaattttcctcaagatggacccggtaaatataaccacaaggaagcgaaactgggtgcgttcactgagttgggttcctaatctgtttctggcctgattcccgcatgagtattagggtgatcttaaagagtttgctcacgtaaacgcccgtgctgggccctgtgaagccagcatgttcaccactggtcgttcagcagccacgacagcaccatgtgagatggcgaggtggctggacagcaccagcagcgcatcccggcgggaacccagaaaaggcttcttacacagcagccttacttcatcggcccacagacaccaccgcagtttcttcttaaaggctctgctgatcggtgttgcagtgtccattgtggagaagctttttggatcagcattttgtaaaaacaaccaaaatcaggaaggtaaattggttgctggaagagggatcttgcctgaggaaccctgcttgtccaacagggtgtcaggatttaaggaaaaccttcgtcttaggctaagtctgaaatggtactgaaatatgcttttctatgggtcttgtttattttataaaattttacatctaaatttttgctaaggatgtattttgattattgaaaagaaaatttctatttaaactgtaaatatattgtcatacaacgttaaataacctatttttttaaaaaagttcaacttaaggtagaagttccaagctactagtgttaaattggaaaatatcaataattaagagtattttacccaaggaatcctctcatggaagtttactgtgatgttccttttctcacacaagttttagcctttttcacaagggaactcatactgtctacacatcagaccatagttgcttaggaaacctttaaaaattccagttaagcaatgttgaaatcagtttgcatctcttcaaaagaaacctctcaggttagctttgaactgcctcttcctgagatgactaggacagtctgtacccagaggccacccagaagccctcagatgtacatacacagatgccagtcagctcctggggttgcgccaggcgcccccgctctagctcactgttgcctcgctgtctgccaggaggccctgccatccttgggccctggcagtggctgtgtcccagtgagctttactcacgtggcccttgcttcatccagcacagctctcaggtgggcactgcagggacactggtgtcttccatgtagcgtcccagctttgggctcctgtaacagacctctttttggttatggatggctcacaaaatagggcccccaatgctattttttttttttaagtttgtttaattatttgttaagattgtctaaggccaaaggcaattgcgaaatcaagtctgtcaagtacaataacatttttaaaagaaaatggatcccactgttcctctttgccacagagaaagcacccagacgccacaggctctgtcgcatttcaaaacaaaccatgatggagtggcggccagtccagccttttaaagaacgtcaggtggagcagccaggtgaaaggcctggcggggaggaaagtgaaacgcctgaatcaaaagcagttttctaattttgactttaaatttttcatccgccggagacactgctcccatttgtggggggacattagcaacatcactcagaagcctgtgttcttcaagagcaggtgttctcagcctcacatgccctgccgtgctggactcaggactgaagtgctgtaaagcaaggagctgctgagaaggagcactccactgtgtgcctggagaatggctctcactactcaccttgtctttcagcttccagtgtcttgggttttttatactttgacagcttttttttaattgcatacatgagactgtgttgactttttttagttatgtgaaacactttgccgcaggccgcctggcagaggcaggaaatgctccagcagtggctcagtgctccctggtgtctgctgcatggcatcctggatgcttagcatgcaagttccctccatcattgccaccttggtagagagggatggctccccaccctcagcgttggggattcacgctccagcctccttcttggttgtcatagtgatagggtagccttattgccccctcttcttataccctaaaaccttctacactagtgccatgggaaccaggtctgaaaaagtagagagaagtgaaagtagagtctgggaagtagctgcctataactgagactagacggaaaaggaatactcgtgtattttaagatatgaatgtgactcaagactcgaggccgatacgaggctgtgattctgcctttggatggatgttgctgtacacagatgctacagacttgtactaacacaccgtaatttggcatttgtttaacctcatttataaaagcttcaaaaaaacccaaaaaaaaaaa

SEQ ID NO: 1666 - protein, 127 aa, Homo sapiens [sequence omitted]

SEQ ID NO: 1667 - DNA, 588 bp, Homo sapiens
atctacggcgctgtggccaagtggctcaccaaaattgaggttccgaaaacagaacagacttttgaagagcgcctgatcctcaaagctttcttgctcaagtttgtcaatgcctactcccccatcttctatgtggcctttttcaaagggaggtttgtgggcaggcctggaagctacgtctatgtattcgatggttaccgcatggaagagtgtgctccagggggctgtctcatggagctctgcattcagctcagcatcatcatgtaggggaagcagttgatccagaacaacatctttgagattggagtcccgaagctaaagaaactatttcgaaagctgaaagatgagaccgaagctggagaaactgactctgcccattcgaaacatccagagcagtgggacctagactacagcttggaaccatacacaggactgactccggagtacatggaaatgatcatccagtttggttttgtcaccctcttcgtggcctcctttcccctggcacctgtgtttgccctcctcaacaacgtcattgaagtgcggctcgatgcaaagaagtttgttacagagctgagacggccggatgct

SEQ ID NO: 1668 - protein, 108 aa, Homo sapiens
GKQLIQNNIFEIGVPKLKKLFRKLKDETEAGETDSAHSKHPEQWDLDYSLEPYTGLTPEYMEMIIQFGFVTLFVASFPLAPVFALLNNVIEVRLDAKKFVTELRRPDA

SEQ ID NO: 1669 - DNA, 1693 bp, Homo sapiens
caacacaaaaagggagccggagaagccctagccgctgcccagcagcttgcgggcgtgttctcgcggttccgggcctcaaggcgacggaaacgaaaggcgagcgaagcgcggaggatccggcgagaagaagcgtcagggagcctcggcggtgtccccggggtccgccgaagccacccggccgccggctggggcccggggtggtgaggaagtgctccgaggcctcgccgaggcctagcgccggctttgtgtccgaggcggcggcggcggcggggggaggcggagccgggggcggcctgcgggaaggcctctcctccgccgaccgcgcgttttcggcctaggccgtggggccgctcgtggcctccggggagcaggcgccaggggtttgtgtgcggtgggggcctgggcctgggcctggggaagctgacgccggtcgtccggaagccaggaggaggcgtgaggccgctcgtggactccgggcctaggccctctcccctcaaccttctcccggggcctgggtcaccccaatccacggagagagagacccgccgggaggtgcggccgcgctatggacccctgaccccgtggggtcgctcggactcttaacgtgtggactgaccgctactgactgcaccgccaatccccccgtctctgccggccccttagcatgagcgagggggacccagccgggtgacattgtgcccgttggcggattctcgatttcccctcttccccgtcctcgtcctcctcctcccccatgaagtgattctgagtatcggggggtctctggattattgttctgacgaacccctgcttgtggttggggggtatttaatctgaggccttagggtccttcggtgtctttgagtgttttgtgtgtacatattttgctcttaaagtttataaatatacgtatattgagagtgtccacgtctcctcgctgaaccttaggaatctcttggcaccatgtcctgtgtgcattataaattttcctctaaactcaactatgataccgtcacctttgatgggctccacatctccctctgcgacttaaagaagcagattatggggagagagaagctgaaagctgccgactgcgacctgcagatcaccaatgcgcagacgaaagaagaatatactgatgataatgctctgattcctaagaattcttctgtaattgttagaagaattcctattggaggtgttaaatctacaagcaagacatatgttataagtcgaactgaaccagcgatggcaactacaaaagcagtatgtaaaaacacaatctcacactttttctacacattgcttttacctttataatgtagcagtgaagtaaatcattttagaacttaatatccaactgatcatagtacatattgtaaataaaatgtattttgatgacagctcagttgaatatggataatatgtggcatcacttgcacacttattttgtagaaatgggtaatttgtgcccgtaacactgtttcatattaaatatgatagcattatccctgtatgacactgtgttgtacagttaatgtatgatcctttttagatcgtttaggttttacactaaggaacatgatgacatgttctacatttgtctgtctatagttagtattttgtatgtatgtacaggctgttgtgtgctttttgtttcttgcaataaaaaatgtttggagtgtatattttg

SEQ ID NO: 1670 - protein, 118 aa, Homo sapiens
MSCVHYKFSSKLNYDTVTFDGLHISLCDLKKQIMGREKLKAADCDLQITNAQTKEEYTDDNALIPKNSSVIVRRIPIGGVKSTSKTYVISRTEPAMATTKAVCKNTISHFFYTLLLPL

SEQ ID NO: 1671 - DNA, 450 bp, Homo sapiens
  misc_feature (1): Wherein n is one of a or t or c or g
naacgtgaagggcgtccaggacgcggtggtcgcggcccttgcagtaggacagcaggcggcgcacgtcggctggggccacgaactgcttggagatcttgttggtggtgcgcaccggcaggcaggcgttggccagcaggtggcccgggcggaagtagtaggcgaactccagcgggcaggccgggtgtgagtgggtcagctggcactccgtcaccacgaggcggtcccgcagcgggctcagcttgacgatgatgaaggcggggcagccgggctggggaggccccacggcgggccggctgggcgcacgcacgtccttgcacacaagccgcacgtagctgtacttgagcacgtcgatgagcgtgtagagcgggggcgcactggcccagcggcagcgcgccaggtgcatggagctcttgacgaagaagagcgccagccgctgctggcaccacgcgt

SEQ ID NO: 1672 - protein, 80 aa, Homo sapiens
  VARIANT (1): Wherein Xaa may be any one of Asn or Asp or His or Tyr
XREGRPGRGGRGPCSRTAGGARRLGPRTAWRSCWWCAPAGRRWPAGGPGGSSRRTPAGRPGVSGSAGTPSPRGGPAAGSA

SEQ ID NO: 1673 - DNA, 451 bp, Homo sapiens
  misc_feature (164)..(165): Wherein n is one of a or t or c or g
gcggccgcgggcgtggaggagccgccgccgccgccagcgtcctggtcctcggaggcgactcccgcgccgtcggctgtcccctcctcctgcaggctggccgcgcgggcagccttcttcacctccacgaaggcgctgcgcttcgcctcgcccgtctcgggacttnnggcggcgcgaagaggcggccgttctcttccaggccgaagtagctgcccgaggctcggtactgctgcggtgtgcacaccagatcctccttggaggccgggaggggccgctctacgaaccggccccggccccctaccagaccagcgccaccgccgccctccgccgcctcctccgggaatttcctctcctttgccgccgcccgtggcgatgccgtcgggactcagctccgcctcctggtggccgccgccgccgccgtttgccgctaccgctggtgaggctctgggctggt

SEQ ID NO: 1674 - protein, 150 aa, Homo sapiens
  VARIANT (55): Wherein Xaa may be any one of Ala or Arg or Gln or Glu or Gly or Leu or Lys or Met or Pro or Ser or Thr or Trp or Val
AAAGVEEPPPPPASWSSEATPAPSAVPSSCRLAARAAFFTSTKALRFASPVSGLXAARRGGRSLPGRSSCPRLGTAAVCTPDPPWRPGGAALRTGPGPLPDQRHRRPPPPPPGISSPLPPPVAMPSGLSSASWWPPPPPFAATAGEALGW

SEQ ID NO: 1675 - DNA, 705 bp, Homo sapiens
  misc_feature (1)..(2): Wherein any n is one of a or t or c or g
nnccaaacgggacgcgggcggcgctcgcgcaatccgaaaggtccgccgtcaccaccgacgccaccaggccggatgccgccagtcaggggctgctccgaccctccgactcccactctctgtcttccttcacacagtgtccccaggattccgccctctgaacacacatgccattgcgctgtccgtgcccgactcccacgcctctcgttctgggaggcttacagggtgtacacacaagaaggtgggctgggcacttggacctttgggtggcaattccagcttagcaacgcagaagagtacaaagtgtggaagccagggcccagggaaggcagtgctgctggaaatggcttctttaaactgtgagcacgcagagcaccccttctccagcggtgggaagtgatgcagagagcccacccgtgcagagggcagaagaggacgaaatgcctttgggtgggcagggcattaaactgctaaaagctggttagatggaacagaaaatgggcattctggatctaaaccgccacaggggcctgagagctgaagagcaccaggtttggtggacaaagctactgagatgcctgttcatctgctgacttctgtctaggctcatggatgccaccccctttcatttcggcctaggcttcccctgctcaccactgaggcctaatacaagagttcctatggacagaaaaaaaaaaaaaaaaaaaa

SEQ ID NO: 1676 - protein, 119 aa, Homo sapiens
  VARIANT (1): Wherein Xaa may be any one of Ala or Arg or Asn or Asp or Cys or Gly or His or Ile or Leu or Phe or Pro or Ser or Thr or Tyr or Val
XQTGRGRRSRNPKGPPSPPTPPGRMPPVRGCSDPPTPTLCLPSHSVPRIPPSEHTCHCAVRARLPRLSFWEAYRVYTQEGGLGTWTFGWQFQLSNAEEYKVWKPGPREGSAAGNGFFKL

SEQ ID NO: 1677 - DNA, 785 bp, Homo sapiens
  misc_feature (1)..(2): Wherein any n is one of a or t or c or g
nnaagcaaccgccctgcactccacgaccagcctgggttcttcatcctggtaacctgacaatggatttcgtggggcccactctcagtgcccgccagcctgtgtcctgcctggccaggcaatgagtaccggcggcagcagctgcctcacccctgcatgacccccccagcccaggggactcaatggcgctgtcatcaaaggggcagctgtagatctaggagggacgtggagggggctagccctgggcctctggcattgtggaggctgacctatagagaacagagctggagctggggagacatgaagtctgcacatctagaccccagtgaggagcccaggctttctaggcacaagccccatgggctccccgggcccagcccctaagaaccacggcagctgcgccaggccactcctgtctccacttccataccctccaaaggagaggcacctccccccccccccatggcatctccaatctgaggacctgccacctcccagaggaccggaggccctgatgccccaagaattgggcttggaaagatgttaatatccactgccccaagtgccaaggttcagaggcactggtccaggacacacagcagcggggaagtggaaccctcactccagcctgcagtctgggccctgtcactgtgctgtctctccatccttccctccccacaaccagggctgtaggcccacctaacacaccacacacttcccacaaacaggagtcacatccttttcagggctggtagggtggctgaagatggcccaaaacctcctgaatg

SEQ ID NO: 1678 - protein, 75 aa, Homo sapiens
MTPPAQGTQWRCHQRGSCRSRRDVEGASPGPLALWRLTYREQSWSWGDMKSAHLDPSEEPRLSRHKPHGLPGPSP

SEQ ID NO: 1679 - DNA, 1138 bp, Homo sapiens
  misc_feature (1)..(2): Wherein any n is one of a or t or c or g
nngcggccgcgcccggcccctggcccgctcgcccgccggcaccatgatggaggagatcgaccggttccaggtgcccaccgcgcactcggagatgcagccgctggacccagccgccgcctccatctctgacggagactgtgacgcccgggagggtgagtcagtagccatgaattacaaaccatccccgctccaagtgaagctggagaagcagcgggagctggcccggaagggctccctgaagaatggcagcatgggtagccctgtcaaccagcaacccaagaagaacaatgtcatggcccgaacaaggctggtcgtccccaataaaggctactcctcacttgaccagagccctgatgagaagccactggtagcccttgacacggacagcgatgatgactttgacatgtctagatactcctcctccggctactcctctgctgagatcaaccaagatttgaacatccagctgctgaaggacggctaccggttagatgagatccccgacgacgaggacctagacctcatcccccccaaccgtgaaccccacgtgcatgtgctgccaggccacgtcctccaccgcctgccacattcagtagcggcggggccactgcggtcgccgggcggggccccaagggccgggtaggacgggcagaggccgaccccttcccagctcgtctgcctgcccccggccccgcgcccctacagccgccaacctcgtataacagtcattgcttcctcctatggtaggacgtgtacctctgtgtgttcatggagctggagaaaccaaaactgggtctctctccacccgggagctgaggaggggtgggggccgtttgttcagttacctgggggaacctcacccagcaccctgccccgcttcccagggctggccaagagagaagactggacggcagggaggtcaacattacgagtggggggatcacaaagccaggggttggccaactcccagcgaacgcatgaactcccaagccccggcctcagcctaaccaggaaaggggctcggagggagaaaggcccagggcagtggggacgggtcccagcacctcggagccccttcacacgcctcctaccggcccatgtttctatttgcatttccccctcctcagatgggaagcct

SEQ ID NO: 1680 - protein, 68 aa, Homo sapiens
TPRACAARPRPPPPATFSSGGATAVAGRGPKGRVGRAEADPFPARLPAPGPAPLQPPTSYNSHCFLLW

SEQ ID NO: 1681 - DNA, 1391 bp, Homo sapiens
gcagtttaatatctacaaagaagcttttagaagctgaaaaagtcaatgtgattgtgcattctgcttttaagaagctgtttcagctatgaactgtgtatgtgctataagtgtgaggtaccataagttatttaatttttaaaagaggaaactcctgagtgagctgtttaagaaatctgagtgtgatctattgttacgttatttataactaggtaaaatgtctgtcgtgatagatttcttttaacgttcagatactgtggttgggttgtctatatttaatatgcagatttgcctgctggaatcataatccatttttaagtgaatgtaagaaatgaaaactactgcatttgtgtcttttgaaggcaaggatccttggattttaaaggaagagtatgtgctttgaaggcactcagagactagtaatagcatatggtttgaagggaaaccgattctctttcaattacaagagagcatcacttagcgtgcagtacttctgttacagcatccgatgtgtcctttattttaaattgtaaccataacagccattaatggctttatttcttgtattgctctcatctgggaaaagtctctacttcttcaaacgtaacataaatctattatgaagcttgtcccctagtatgccattataaagaaaaaattcttcgatggtatgcagtgtatctattctgtttgtaaaagatcatgtcaaaatgttctgcctctataatgataatagatggttttgtctttcaggatatttatccacctactgtcttctttgccttaaagggacacttggccatcatttttaggctcgaacttaacactgttaagaaataactgaaatatgatggtatttacattaatttttgaaattcaatggtgggatagaattaggtcaggaaatggaagttgttccaatggtgtgagaactaggagacaagatgattcactttattatttaaaccaagcttcatttttagtttttgttgtttaaatggactggaaagttaagtttttgcagggattgttttgaaataaagagatatgctaactcacagatgaactttgttaagacccctttatttttatataaagtctaatatttgaaaagcgattgttataaagtaaaattctctcttcctattctaatatatatcatatatttcaggcttctatttgaaaacaggtataagagatgatatgatacaaccctatagataatgttttttgcttgattgacttatataatcactgtttcatgattactgcttttggaataataggaagttttgtgaaatgctggccttgtgtatatcttagaatgcaaatttaataaagtgtgtatacatgcataaaatttaaaaaaaaaaaaaaaaaaaagggcggccgct

SEQ ID NO: 1682 - protein, 62 aa, Homo sapiens
MLLLVSECLQSTYSSFKIQGSLPSKDTNAVVFISYIHLKMDYDSSRQICILNIDNPTTVSER

SEQ ID NO: 1683 - DNA, 479 bp, Homo sapiens
  misc_feature (1)..(2): Wherein any n is one of a or t or c or g
nntcctccgaggtgtccgcgcgccgacgccaagaagctggtgcgctccccgagcggcctgcgcatggtgcccgaacaccgcgccttcggaagcccgttcggcctggaggagccgcagtgggtcccggacaaggagtgtcggagatgtatgcagtgtgacgccaagtttgactttctcaccagaaagcaccactgtcgccgctgcgggaagtgcttctgcgacaggtgctgcagccagaaggtgccgctgcggcgcatgtgctttgtggaccccgtgcggcagtgcgcggagtgcgccctggtgtccctcaaggaggcggagttctacgacaggcagctcaaagtgctcctgagcggagccaccttcctcgtcacgtttggaaactcagagaaacctgaaactatgacttgtcgtctttccaataaccagagatacttgtttctggatggagacagccactatgaaatcgaaattgtaca

SEQ ID NO: 1684 - protein, 159 aa, Homo sapiens
  VARIANT (1): Wherein Xaa may be any one of Ala or Arg or Asn or Asp or Cys or Gly or His or Ile or Leu or Phe or Pro or Ser or Thr or Tyr or Val
XPPRCPRADAKKLVRSPSGLRMVPEHRAFGSPFGLEEPQWVPDKECRRCMQCDAKFDFLTRKHHCRRCGKCFCDRCCSQKVPLRRMCFVDPVRQCAECALVSLKEAEFYDRQLKVLLSGATFLVTFGNSEKPETMTCRLSNNQRYLFLDGDSHYEIEIV

SEQ ID NO: 1685 - DNA, 594 bp, Homo sapiens
cggccgccggggtagtggagagaactgggaacaggggtcctggggtgtgggatgcggcccctggggtgggggtgccggactgtgtggttcttgttcttagcaaagtagtagggcagccacgtttttcactaggtcctcgtagcccgaggacctaataagacacaatagaaatgggctgatgtcaaggggatagtgtttggaggtgggtaggggctttgccttgcccgtattgggtagaacagggacatctttttctttgggccgaatgattggaattgtttccgtagtcgctggagccccagcggaaatgatcagagaggacgatattattcgtaaatttaggcgaaagggtcacatttcaccccaatctggatgtgtgcttgccgtaatcgattggttgcagctattaactctgggactgggtggtttgaggcgaggctacagcccctccttcagttcagacacggctgattttagtatagtgggggtggggggtgggggatggatgtcactagggcgagatctaggcctgtcattaatcacccacaagaacgccactttggctgagtcaagacctgtttccctagcagggtc

SEQ ID NO: 1686 - protein, 109 aa, Homo sapiens
MIGIVSVVAGAPAEMIREDDIIRKFRRKGHISPQSGCVLAVIDWLQLLTLGLGGLRRGYSPSFSSDTADFSIVGVGGGGWMSLGRDLGLSLITHKNATLAESRPVSLAG

SEQ ID NO: 1687 - DNA, 521 bp, Homo sapiens
tttttttttttttttttttggggcttaagacgacagaaatttattttttcaccattcacgaggccagaaattcaaaaaggaggtgtgagtatgattgatttctttgagaggctttcaggtaaaatctccttcttagcttctggtggtttccagctgtccttggcattccgtgactgtaggcagcgtaactccagactctgcctcccttgtcccatggccgtcttccctgtaggtctctgtatgttcccatgaccttcctgaaaggacacagccattggctttacagcccaccctaatgcattgtgaccttgtcttaaccaagtgttatctgcagagaccctgtttccaaatagtttaacattcctgggttccagctggacatgactttctgcgggacactattcaacatgggaaacatgcgtgtattttttagaacataatgagttctgcctctgttataaagccccctttcttttcattagtgttgattattataaaatagcatggagagttgacagagc

SEQ ID NO: 1688 - protein, 67 aa, Homo sapiens [sequence omitted]

SEQ ID NO: 1689 - DNA, 813 bp, Homo sapiens
tccggacaacggctgcggcgacaattttttactggggcttccggatgcagatgacgatgcgtttgaagagtacagtgctgacgtggaagaagaggagccagaggcggaccacccccagatgggggtcagccagcagtaaatctgggggctcccctgagaaggagagtgagccccacagtaacctaggcatgtcggtgtaaacctgattgtctcgacattttctgtttaattgattggtgctgtgaggagttcggctgctcgtggtaaaacagcgtactccagttttaagtcatcgggtaaaataataggacagtgatttccatctgtgcttcagtacccactttgtgttcttttcttgaaaagtcatactaaaggttaatttcaagtaaaatgaatttccttccaagtagcctattagtaaaacacaacttagtgtttcatccattggggtgagcatatactgccctttgcagccctgcctgtgttctgattggctccattcatgagcaaaggtgattgtgagctgtatattacacaggtgtcgcccaggtttcgtaacctccactttaatgcagtaagccgcaagaatgacttctgcaagtgaaatgaggaagcttcactagcttgctccattggaaggtaaactgaaattttatacgttgaagcttaaaatctaaatttatgtatgtttggaaatggaatggacattaacataaaatgtattttatcaaaaaagtgtttagactttgaccaaatacatgttggtattatcatgttaatgttctctgtttataaaaattgagtggagataaa

SEQ ID NO: 1690 - protein, 67 aa, Homo sapiens
MEQASEASSFHLQKSFLRLTALKWRLRNLGDTCVIYSSQSPLLMNGANQNTGRAAKGSICSPQWMKH

SEQ ID NO: 1691 - DNA, 442 bp, Homo sapiens
agtactttctagacatcttgacctttgtcttctggttccaggagctgctatcgctaggaaaaggaagtcctgtctgctcacagcccacccgcctctgcacaggtgtccctgggttggctcgttgatggtagtggtggaaattgtctcagtcattacttacagcctgtgaatcctattagcatttctccaattttctctgtttttatcaagggaacagaaatccatcatcaggtatttccacaaaattgacctcatagttccttcctgggtttaatgctcagttgccaaaatagaagtgaagagtcagcagagttgatgtgaagtcacttggagtgaatatcttcaaattaacaagacgtaacatccctttcctgcctttagcccacaaatgcccacctctgctgagccaccttcttgcaaaggaggcttttggaaaagatct

SEQ ID NO: 1692 - protein, 51 aa, Homo sapiens
MTETISTTTINEPTQGHLCRGGWAVSRQDFLFLAIAAPGTRRQRSRCLEST

SEQ ID NO: 1693 - DNA, 488 bp, Homo sapiens
tgatcatgggaggaaagcagagtagggagaggcaccaggcagtgaacagtggcaaaggcagctgggttcgaatcctgtaggtccctggtgggtcacacatcttctccttacttcccgtgtgtattattcccatgctggttcagaaagtgctttcctatctcttatctcatttccccagactccaaaattcacccgcttcccctctgcctgttgggtagtcaaggactttcccctctgagcctcgtctccctgaggtagaatgtgcgtttgtatttggtgacatctgaggccttctctgcccgcaattctgggctccgggaatcttagaagggctctgaagagcaagaaaggtggtggcaacaggagacattgcacccccagggaagggctgcgggcaggcagctgcctgcacttcctgcctcctgaagcagctgccggttctgtgtcataagcttcttcgagtctcaggtccaagaggggcttccgga

SEQ ID NO: 1694 - protein, 67 aa, Homo sapiens
MSPVATTFLALQSPSKIPGAQNCGQRRPQMSPNTNAHSTSGRRGSEGKVLDYPTGRGEAGEFWSLGK

SEQ ID NO: 1695 - DNA, 377 bp, Homo sapiens
  misc_feature (41)..(342): Wherein any n is one of a or t or c or g
tggccagttgaaatatctcctcctgactcatcattgagcanacagcagaccagtacaccagtactgacacaacctggtagggcctatagaatggaaatacaagtgcctccatcaccaacagatgttgcaaaatcaaacacagcagtgtgtgtttgcaatgaaagtgtaaggactgtcattgtgccttctgagaaggttgtagatttgttatccaatagaaacaaccatacaggtccttcacatagaactgaagaagtgaggtatggcgtgagtgagcagacctcttntaaaacagtgtcgagaaccacatcaccaccattatcatttcccaccactcatctnattcatcagcctgcaggctccagatcactggaacc

SEQ ID NO: 1696 - protein, 95 aa, Homo sapiens
  VARIANT (66): Wherein Xaa may be any one of Cys or Phe or Ser or Tyr
MEIQVPPSPTDVAKSNTAVCVCNESVRTVIVPSEKVVDLLSNRNNHTGPSHRTEEVRYGVSEQTSXKTVSRTTSPPLSFPTTHLIHQPAGSRSLE

SEQ ID NO: 1697 - DNA, 496 bp, Homo sapiens
agatctgcgattcagcattcagatggcacacttgctgcggccctcggaagagccacgtgttcttgtcacttcagtgaagctgagtgaacaatgtgcccaatttctgtgtgaatagctcagggttcacattgtacctgccacagcaaccactttgtaaatttttaaaaacaagttcaacagtgggtaaacgaacagaaacacgtacccccaacatcactgaagggaagcccagaaggctgatgaagaagagtgttcccgcaggaacggccgcatgtggccgcatcgctccagattagctaacatgggaagcatgaacaactttctatagaaaagatgggggctgtctatttaatttcagggaactgaaaaaaaaagtttctcttctcagccagtgactaatgtgtggtgaggagagcaggggtctgtgttttggggaagaggacagtatgggggcttgttgagcacctactatgtgcccagcagccactctgctagc

SEQ ID NO: 1698 - protein, 70 aa, Homo sapiens [sequence omitted]

SEQ ID NO: 1699 - DNA, 484 bp, Homo sapiens
  misc_feature (1)..(2): Wherein any n is one of a or t or c or g
nngggccccgacggtttagacgtctgtgccacttgccatgaacatgccacatgccagcaaagagaagggaagaagatctgtatttgcaactatggatttgtagggaacgggaggactcagtgtgttgataaaaatgagtgccagtttggagccactcttgtctgtgggaaccacacatcttgccacaacacccccgggggcttctattgcatttgcctggaaggatatcgagccacaaacaacaacaagacattcattcccaacgatggcaccttttgtacagagtcaacatcaagctcaggagctggttgcagacatagatgagtgtgaagtttctggcctgtgcaggcatggagggcgatgcgtgaacactcatgggagctttgaatgctactgtatggatggatacttgccaaggaatggacctgaacctttccacccgaccaccgatgccacatcatgcacagaaatagactgtggtacc

SEQ ID NO: 1700 - protein, 107 aa, Homo sapiens
  VARIANT (1): Wherein Xaa may be any one of Ala or Arg or Gln or Glu or Gly or Leu or Lys or Met or Pro or Ser or Thr or Trp or Val
XGPDGLDVCATCHEHATCQQREGKKICICNYGFVGNGRTQCVDKNECQFGATLVCGNHTSCHNTPGGFYCICLEGYRATNNNKTFIPNDGTFCTESTSSSGAGCRHR

SEQ ID NO: 1701 - DNA, 490 bp, Homo sapiens
ggtacctcctcctagattttgttcttggcagagataaaccagtgcttctcagtcatttttgctttttactagccatgggaggtattttccagtaaaggcttctatgaccaaatgcatttgaaggaatgttccatatgctctcccacacgccttcaatttcctaatgggagaacctcaggcgccaagccagatgagataaaagtttcaaatagtgctgataaggttttcttggttcagctgcctccctccaactcagctgctgtcacacttctaggcagttttgactggactgtaaattccttctggctggggccatgtctcagcaccttgtgcaggagtgatacaaactaatgcttcataataaatacttactcactgactttctctttattcatcccaggtgagcatgttttccatccccttcaatctccacactcacgggcaaaagtgagttgtgggtcttggaactctcaagaagaggaggagatct

SEQ ID NO: 1702 - protein, 79 aa, Homo sapiens
MHLKECSICSPTRLQFPNGRTSGAKPDEIKVSNSADKVFLVQLPPSNSAAVTLLGSFDWTVNSFWLGPCLSTLCRSDTN

SEQ ID NO: 1703 - DNA, 648 bp, Homo sapiens
agatctgtgctgtgaccggatggggaagcatcagtgcaggtaagcatatttttgttgcataaacattaatgccagttgttatttttgaaaataggtcatgtaaatgatatcaagcagcatccgcttcagcccctcttcttttattctgcccatccaggagggatcacagagaagatgatctgtgctggctttgcagcatctggagagaaagatttctgccaggtgagaggattctggttttatacaggaaggtggaaaattgccatctgctgaagagtttctatagacaggagaaaccattgctgaaatcaccaacttgtcacgtgcttcaatatcatatcccttccaggcccctgaaggcctttgtccgttgtcgtcaggactaggtcggtctcgcccaatggcgacagagtggtcacccgggaaccggatctgcgcggctccgtggcctaaagaggtggccgagcctgcttgcgtccctaggccgccttcccgggccctccacgccttaatggcctccgccgcgcggcgttcgagctgccgccatacttcccggcccaccacgcccagcgccgcccaaaggcgctgcgtcccggcggctctgcgggggtttcgtcgaggcttgggtcgggagacccgggtgccggc

SEQ ID NO: 1704 - protein, 82 aa, Homo sapiens
MATEWSPGNRICAAPWPKEVAEPACVPRPPSRALHALMASAARRSSCRHTSRPTTPSAAQRRCVPAALRGFRRGLGRETRVP

SEQ ID NO: 1705 - DNA, 331 bp, Homo sapiens
  misc_feature (7)..(226): Wherein any n is one of a or t or c or g
tgatcanaccaaagcaatggaagaaatgtcaccagtaaggaaaactctaaggcctccaagatgatacttggcatttttaaagtccctattttacagtcccttcaaaatatttctcttcttaaggcctgaatgacaggtactgccaatgcttggcaccattggccagcattactgctcatcactctcgttgaaccatatgcattcagggcctcacacctgaggccancaagagactgtgtgcaggagcacaggcaggaaccctccagacactccctcggagccctcctctccctcctccgcactggcagctctgtgaaacatgaagtgctcg

SEQ ID NO: 1706 - protein, 67 aa, Homo sapiens
  VARIANT (33): Wherein Xaa may be any one of Ala or Pro or Ser or Thr
MTGTANAWHHWPALLLITLVEPYAFRASHLRPXRDCVQEHRQEPSRHSLGALLSLLRTGSSVKHEVL

SEQ ID NO: 1707 - DNA, 392 bp, Homo sapiens
  misc_feature (377): Wherein n is one of a or t or c or g
aagcttcgttcaccatggaggaacctcagaaccaccggcaccgatagccaagctgccagagaatggaacggatgccctccattggcacaaactccagcagccggcttgtcaggaagctgcagcagcttcagagcaacccaggcctcggggttcacctggcgcgtcaccgtttcccgatagccccccgcccccgcacaggcactgatgaccccaccacattggcctgtgcctgccctgcaggaaggcaggggaggaggaagtggtcgggctggattgcatgtctgatgtgtgtccgataaatgtccagtgcgtgtccactgcgtgtctggtgagtggtgagtgtctggtgtgtgtctgatgtgtgtctgatgcatatntggtgcgtgtccgga

SEQ ID NO: 1708 - protein, 124 aa, Homo sapiens
MHQTHIRHTPDTHHSPDTQWTRTGHLSDTHQTCNPARPLPPPLPSCRAGTGQCGGVISACAGAGGYRETVTRQVNPEAWVALKLLQLPDKPAAGVCANGGHPFHSLAAWLSVPVVLRFLHGERS

SEQ ID NO: 1709 - DNA, 319 bp, Homo sapiens
ggatcctctgactgacggcgggaattgcaatcatggagtgggaaagctgccttgtagatcccagagtttacaagtctgttgatcccaaacttgctaacattgtttatcacttgatacttgacccgagagaggatgaagtaaacaatgcggcttctggtggctggattgaagaaagcatctctatcaactatgtaaaaatcattcatccggttcttctcaaatggggcagtgaaaaactcttgctctggcttgatgatgctttcgtctacactgaggactttggtaaaccagttgagtgtaccaaaggctgaggaccggt

SEQ ID NO: 1710 - protein, 92 aa, Homo sapiens [sequence omitted]

SEQ ID NO: 1711 - DNA, 259 bp, Homo sapiens
  misc_feature (259): Wherein n is one of a or t or c or g
gtgcacacctgtttggcttcatggccggcaactacagatctagctttactggggagtgaagttctttcagctttattgtggagtgaagcctgctgcacataatggagaacactggcccagtcactcaaatcacaaaggctatttcgtatgtgcttcaaagatataagacaggggttttgatcaaagccacagacctgcattcctgctgtgcctccattcctgaataccacagactctgcccagtttgcttgaatgaatn

SEQ ID NO: 1712 - protein, 66 aa, Homo sapiens
MQVCGFDQNPCLISLKHIRNSLCDLSDWASVLHYVQQASLHNKAERTSLPSKARSVVAGHEAKQVC

SEQ ID NO: 1713 - DNA, 624 bp, Homo sapiens
ggatcctggaagggagagtctgctggtctccagggttggccttgtggagattcttcaggaggccacctcacctaagcctccatccctactagacacccaggtattgcttgagaatgatgggacagcacactctgagctttccatgccatctgttccacctggtgacttaatctgagctggagacagacctccaaggtgtctggaacaactattcttctttcccatcacatggaggttggtgaggaagctctgctctgctccacgcatcactcaggaacccaagtttcttccagctagtggctttcttgtcctttggaatctcagagccctccactgcatcctctatatactttgtcccagttcctcgagcccaattccacagggcaacatgaatgagagccaggtgcctcctgtgcaggcagtgagtttggatcacaggagagaaacccccaaattaggagacttggagtttatatagagaatctggtatatcttcctctcttcctccttcatagctgtgcaccctcagattctgtattaggaagatcctgaagatcatctttcctcttcctctcctgtcctccaattgtcacaatcctcccatctcaccccttagccgggccc

SEQ ID NO: 1714 - protein, 70 aa, Homo sapiens
MRGAEQSFLTNLHVMGKKNSCSRHLGGLSPAQIKSPGGTDGMESSECAVPSFSSNTWVSSRDGGLGEVAS

SEQ ID NO: 1715 - DNA, 468 bp, Homo sapiens
tgtacatttcttttcccaagtgtgccagtagctaatgggatctcaatgcctacctttaacctagacaattcatgctcaaatgagaggttttaagttgttgtcttctactcattaaatccttgtgtcgtcatcctagggaacacctttctccataataggggcaaagagcacattgtccacggtctgaagacttttcttggcatccacagaaaggggtttggtaggtggctggaatgcaggtctggaaggcacaagagagattaagcaccatctgcacacgggcaatagctgaagctgtatacactgatggcttcaccttcatcaagaaatggccctaggacagtgatgtcgtagaactggagtcaggagtcctgggtcttgccttggctctgccattaacttgctctgtgactttaggcaagtcacgacctctctggatcaatttcttcttctttcccacagccagtc

SEQ ID NO: 1716 - protein, 64 aa, Homo sapiens
MKVKPSVYTASAIARVQMVLNLSCAFQTCIPATYQTPFCGCQEKSSDRGQCALCPYYGERCSLG

SEQ ID NO: 1717 - DNA, 376 bp, Homo sapiens
  misc_feature (322): Wherein n is one of a or t or c or g
gatccacatcacggaggtgatggcaccagtgccagttccacgggtacccagagcccagagatatttggtagtgagcttggcaccaacaatgtctcagcctttcagccttaccaagcaacaagtgaaattgaggtcacaccttcagtccttcgagcaaatatgcctcttcatgttcgacgcagtagtgacccagctctaattggcctctccacttctgtcagtgatagtaatttttcctctgaagagccttcaaggaaaaatcccacacgctggtcaacaacagctggcttcctcaagcagaacactgctgggagtcctaaancctgcgacaggaagaaagatgaaaactacagaagcctccccgcgggatactagt

SEQ ID NO: 1718 - protein, 124 aa, Homo sapiens
  VARIANT (108): Wherein Xaa may be any one of Ala or Pro or Ser or Thr
DPHHGGDGTSASSTGTQSPEIFGSELGTNNVSAFQPYQATSEIEVTPSVLRANMPLHVRRSSDPALIGLSTSVSDSNFSSEEPSRKNPTRWSTTAGFLKQNTAGSPKXCDRKKDENYRSLPAGY

SEQ ID NO: 1719 - DNA, 377 bp, Homo sapiens
tacaccttgcgagaaaccaggtcggcccagcaacgaggaaagctggtggaaagtgagaccaacgtcctgcaggacggctccctcattgacctgtgtggggccactctcctctggagaacagcagatgggctttttcatactccaactcagaagcacatagaagccctccggcaggagattaacgccgcccggcctcggtgtcctgtggggctcaacaccctggccttccccagcatcaacaggaaagaggtggtggaggagaagcagccctgggcatatctcagttgtggccacgtgcacgggtaccacaactggggccatcggagtgacacggaggccaacgagagggagtgtcccatgtgcaggactgtgggccc

SEQ ID NO: 1720 - protein, 125 aa, Homo sapiens
YTLRETRSAQQRGKLVESETNVLQDGSLIDLCGATLLWRTADGLFHTPTQKHIEALRQEINAARPRCPVGLNTLAFPSINRKEVVEEKQPWAYLSCGHVHGYHNWGHRSDTEANERECPMCRTVG

SEQ ID NO: 1721 - DNA, 324 bp, Homo sapiens
tgatcatctacatgctgggtttagaagaatatagattaaccggttctggggaatacaagtcccttaacttacatggaagaagcagacttttttatcaaagagataggagaaaatgctgggtttgtattccgtttcatttcatttatttatttttggaattgtcaatattatatgtctaaatctgtggcatagggctttggaaatctgatttgactgttctcaataattacttttgttcttaaacaactcatacatggccatactcctgggtatgtattaataaaagcaggtttttaaactgctcagctaagtccattctccgga

SEQ ID NO: 1722 - protein, 55 aa, Homo sapiens
MLGLEEYRLTGSGEYKSLNLHGRSRLFYQRDRRKCWVCIPFHFIYLFLELSILYV

SEQ ID NO: 1723 - DNA, 330 bp, Homo sapiens
  misc_feature (1) ..(237): Wherein n is one of a or t or c or g
ngagctggaggtcatcaatgctgaggagcagacgagtggccaggcttctggggctgactcaactgacaattcctcctcgcttcaagaagatgaagaagtagagatggaggccatcagctggcaggccagcagtccagccatgaatgggcaccctgcccctccagtgacctctgctcgttttcccagctgggtcacctttgatgacaatgaagtcagctgccctttaccaccagtcanctctcctctgaagtccaatacacccaccaagtgcctctgtgatcccggatgtaccttataattcaatgggatcctttaagaagagggaccgtc

SEQ ID NO: 1724 - protein, 64 aa, Homo sapiens
  VARIANT (45): Wherein Xaa may be any one of Asn or Ile or Ser or Thr
MEAISWQASSPAMNGHPAPPVTSARFPSWVTFDDNEVSCPLPPVXSPLKSNTPTKCLCDPGCTL

SEQ ID NO: 1725 - DNA, 511 bp, Homo sapiens
acgcgtgtgaaggaagcacaggcctgcccctgtcatccctccatcttcccacatcctccgtcaaccatgttccgatccctgggaagtgattctgagtatgattcagagaggctcagttttgtagctccacctggcagcaggtgtgtgctgagtgggttttctgggtgccgcctgttgccaggtggcggctggggtgcttagcaaccctcaaggtccccaactaacccctgaagtgtggtcacatgggaataaagacaaacaactccagttctgtcctctgggcctcctgctctaccctcacatgcccacagagccgggaggctggaccaaggtcagcatgcaccctggcggccccgcaccacagggaagcgccatggcactgcctgcgaagccagatatgtgctcggcagaggcaaagaggacgcttcgcatgccagggctgcaccaagagctccaaatcacaaggcctcagggcaggccaggctccactaccctcctgaaggagactgga

SEQ ID NO: 1726 - protein, 85 aa, Homo sapiens
MGIKTNNSSSVLWASCSTLTCPQSREAGPRSACTLAAPHHREAPWHCLRSQICARQRQRGRFACQGCTKSSKSQGLRAGQAPLPS

SEQ ID NO: 1727 - DNA, 249 bp, Homo sapiens
  misc_feature (249): Wherein n is one of a or t or c or g
agatctcccaggcagtgaatgtccagccagtgttcagtgactcagacccaaaaagcccacaaagagcctccacgcagcaaataaaggcagcaggagaggagggccagctcccggcagtgagtggaatgcaaatggaactctgccctccgagcagcacagccgccagcggctggccacgcacactgggccttgtgccatggggctgcgtcgcgtactgtgccctgggcacgcaggggtctcctctagagn

SEQ ID NO: 1728 - protein, 54 aa, Homo sapiens
MAQGPVCVASRWRLCCSEGRVPFAFHSLPGAGPPLLLPLFAAWRLFVGFLGLSH

SEQ ID NO: 1729 - DNA, 344 bp, Homo sapiens
  misc_feature (344): Wherein n is one of a or t or c or g
tggccagcctccctctagcctcataaatcctcccatggggtatttgaaatgaaatgaagacgtcctatcactgtgtccataaatactgtggtatgtgcccccagcagataaaatatctctcctttttagaaaacacagtcacaatataatcatcacaatggatccctaaatattcagcctgttcacatttccctgactgaaaacggctgttgtaacgtcttttccttgctgccccggccgaggcgcgtcttcccgccccgcgccctctgtcctctcgctttctgggcatctgcgtgtggatcccgggccgttcgtcccatgggatgcccactctcgggctgcgn

SEQ ID NO: 1730 - protein, 73 aa, Homo sapiens
MPRKREDRGRGAGRRASAGAARKRRYNSRFQSGKCEQAEYLGIHCDDYIVTVFSKKERYFICWGHIPQYLWTQ

SEQ ID NO: 1731 - DNA, 346 bp, Homo sapiens
tggccaaaccgaaagtgcaatcaaattccctcggactcggttggcattcccccatattcttatgccttcccccactgtaaagtgaatgatgttgtcatctatgtccaatccatctgtcccaaatacaccaattgctggagagaagccatggtgaaaagcacagcctcgaatataagatgagccatgttcttgaatctgtcctaggttaagaaacgttacagcatatcttggatctgtgctatccctgaagccttcttgaccactgtgataaaattccacattacttattcttgcatttcctttaaatgtcatcatattttcagtgaatgagccaaccagtacgcgt

SEQ ID NO: 1732 - protein, 105 aa, Homo sapiens
MMTFKGNARISNVEFYHSGQEGFRDSTDPRYAVTFLNLGQIQEHGSSYIRGCAFHHGFSPAIGVFGTDGLDIDDNIIHFTVGEGIRIWGNANRVRGNLIALSVWP

SEQ ID NO: 1733 - DNA, 399 bp, Homo sapiens
agtatggagaaggacccggaaggaaccaaagtggatgcagggagagcagttcagagagatgaaccattcaggtctgggctggtgcatttgtctgggtgcaggacgaggtgcatttgtgtttaggaaaaagaggcaggtgcaagtttttaaaaactcaagcaacattgttctaagcacgtgaagagggacttatgaggcaatggctatggagatggagaggtgaggagaggtttaagagattcttaatatgcaggattgacagaatatggagacagtctattgctggcattattttggtagacgggagggagaaaggacatcgaggatgactcaggtttctggctttgatgattggagatacagtgagaccactgactgagacctggaatgcagtggcca

SEQ ID NO: 1734 - protein, 55 aa, Homo sapiens
MLLEFLKTCTCLFFLNTNAPRPAPRQMHQPRPEWFISLNCSPCIHFGSFRVLLHT

SEQ ID NO: 1735 - DNA, 463 bp, Homo sapiens
ttttttttttttttttttatgaatgaatgacaatttatgttttgccaccaagcactgtgactgtccagagactggagccctcttgctctgactagtgggctcagtgcccacaggagagctgtacagaagccaaaccccactcagaagggtggatcatggaagggagtcagaacaagcctggtggcggcaggcgcttcataatatcagaggaagctgcaggagaaccatggctaaagaacccatgcactccagggctttggccgtgacttctcccctgagcagcttgaggcgcactgccaaggctaaagtttgcctctgccactctcttaggagagacaccttcataacccgagtcgggtgcctggcgatcatgcaggtctggcctgtgatgtgggttcctgggttggggtgggggttcttgtgtctcctccttgttccacctgtcatcccacgcttgctgtcc

SEQ ID NO: 1736 - protein, 83 aa, Homo sapiens [sequence omitted]

SEQ ID NO: 1737 - DNA, 1883 bp, Homo sapiens
cctaggaagggcgttgcgagctcctaaatggaaagcttctctgggggtagggagatgaagagccaagatgctggtgaagcaggtgcagtgaggatccaaggcaaggaattgccctgagggaggtggctgcatatggagaaaggcagttctctgtgggcaaggccagcttgcttcaggctgtagagggaatttggtctgaagcaacagggcatgaactgtgactttgagctgccaggttgtcttcatctcagaactttcctatcctggcactctcgttacctttcttctataccttggcctctgtaactgcagtccaaaacaagttacagctgccttaatccactgagattctctatgaggatgtacagaaaagttttcctgtaataattttgcttatatgctaactcttttcatgttagcaaagaatattctatgaattagaatgttactgtggtagatctaaaggagaatgaacagaaggtgctggaggacctgttaaacaatctctggctattaaaaaacatcaagatgagaattaaaggcatatcctgatatacttgcctgcttgcacatgaggctgggagatcccatgcctgttgaagttaactctagccctgacctctattgatcttttgggaatgagggctgatttgaaggtgctgttgcaggatttcatttagctgctgccagttcaagtgacctgtccccagggctgcagctgtatccacctgattgcagtaggtgagggctaacagcagaatttaaagtggaccctgggctgtggagcaaagtgactatccatttggacttttggataatgtggcaggagtcccagctgtttaatttctagtcacattttccagaaagttgttctaagttgagattactgacaagatttctcaagggcaggaccagatatgtgagagacttctagttcagagctgacccctctaagcctctgacacttaaacacgagtcctgctgtccccagcacacaactgcactgaagccttgttcctctcggctggtgtagagctcatctgcatgttgtgtgcagataccagtagcctccctgcttgaacaggcctctcctaggctaggcaggtgttcagaggcatgaaggtctgggcaggggaagggcgtcttctgaaatgggagttaccaggtttttaaatgctgctattgttttatttaccatttaaggtcttttctattatatctgagtaactagtcagtttttcttacagtgctcatagcagttgtatttgaattgtattttcagtgaaatttgttttacattgccatttaaaattggcctttaacagcttcccaactggcttataagatatttttttttaatgaaaacataacccatgaggctcagatgctgttgaagaaataaatggtatgttgctgctgacagtagtgcttgcctattgtaacagcattggttctgctgtagcctcggtgaccatttaagttgaataaatctgtcattttcacccacaaacagttgttgagcccctggatttgggttgtcactgtggttctcctgccagtgctataatccagtgtcgtaggtgcagggtatgaatcagctcagcctcttaggagagaggggctctcagcgaggagggggcggggggggggtcactatttatcttccagaggcagggttcatggattcctgatgtttagaggcggaagggaccttaggtcacctacttccacggttttcatactgttctctggggcctcgtggagagggagcctccaggcccattcaaagctttattagatttaaaagtaagatctggtatgaagaaaggttttgtttgtttcttaaaataaaaagtctgaaaatcaaaaaaaaaaaaaaaaaa

SEQ ID NO: 1738 - protein, 82 aa, Homo sapiens
MKTTWQLKVTVHALLLQTKFPLQPEASWPCPQRTAFLHMQPPPSGQFLALDPHCTCFTSILALHLPTPREAFHLGARNALPR

SEQ ID NO: 1739 - DNA, 849 bp, Homo sapiens
  misc_feature (840): Wherein n is a or t or c or g
taccatgatgtttaatccaactgacttttcctctggccatgcaggcaaccgggtgcagacacagcggtatcctgtgtctggtcgcagaaacacctccatcacaacattttggcagaaggcactcaaaccagaccccaacacaactggtgaccgccctcagaaacagctcaatctagtcttacaaagcacttttaataaatgacatctagatgtacttctcaaccatatcattacaaatcaaatgtgagttggggaagtgtaaaagtttacacttttgtttgaagcaaaaggactttcagagcattttccaattcatatatcttttctaaaagggagtggagccttatgttctattcttagagcagaaattctagtttttgaaagagatgcggatcagctcaattttagaacaagtatgggaaagttgaataatctttctgaacacgtttgtgcagctcacgccctaggtacgagatattagacgctaagcccagaccctggtgggagtcaacagcaggccctttatcctggagatctagaacaggcatgaggcccagcgcatcctcaactgcacatgctgagaacctatgagcttgagatgcagacgggaacggcatcagtcacagctataattaaccagggctgggaagacattcactctctaagaacaatggcttttctgcttctggagtgtgtgtgtgtgtgtgtgtgtgtgtgtgtgtttcaacagaatttgaatactattcttcctttttaaataaggagaatgcatgtaagtagtacatccctcctcccacactggaaataacagatagtagaaaatgtatgttaatctaaacnccaactagt

SEQ ID NO: 1740 - protein, 70 aa, Homo sapiens
MPFPSASQAHRFSACAVEDALGLMPVLDLQDKGPAVDSHQGLGLASNISYLGRELHKRVQKDYSTFPYLF

SEQ ID NO: 1741 - DNA, 989 bp, Homo sapiens
  misc_feature (1): Wherein n is one of a or t or c or g
ngcggccgcccacggggaagctgcgaggcgcgggagcacctgggggaccgcttgcagcggggacgcgaggacccgggctgggctttcctcacccggattaaccgagccccaagctttggaactgatcagaaaatagactatgatgtaaaaaggggagtgctgctaaatgcgttgaagctactaaacataaggaccagtgacaaaagaagaaacttggccaaacaaaaagctgaggctcaaaggaggctctatggtcaaaattcaattaaaaggctcttaccaggctcctcagactgggaacagcagagacaccagttggagaggcggaaagaagagttgaaagagagactcgctcaagtacgaaagcagatctcacgagaagaacatgaaaatcgacatatggggaattatagacgaatttatcctcctgaagataaagcattacttgaaaagtatgaaaatttgttagctgttgcctttcagaccttcctttcaggaagagcagcttcattccagcgagagttgaataatcctttgaaaaggatgaaggaagaagatattttggatcttctggagcaatgtgaaattgatgatgaaaagttgatgggaaaaactaccaagactcgaggaccaaagcctctgtgttctatgcctgagagtactgagataatgaaaagaccaaagtactgcagcagtgacagcagttatgatagtagcagcagctcttcagaatctgacgaaaatgaaaaagaagagtaccaaaataagaaaagagaaaagcaagttacatataatcttaaaccctccaaccactacaaattaattcaacaacccagctccataagacgttcagtcagctgccctcggtccatctctgctcaatcaccttccagtgggggacacccgcccattttctgctcaacaaatgatatctgtgtcacggccaaacttctgcatctcggtcacattccttaaaccgtgcttcctcc

SEQ ID NO: 1742 - protein, 324 aa, Homo sapiens
  VARIANT (1): Wherein Xaa may be any one of Arg or Cys or Gly or Ser
XGRPRGSCEAREHLGDRLQRGREDPGWAFLTRINRAPSFGTDQKIDYDVKRGVLLNALKLLNIRTSDKRRNLAKQKAEAQRRLYGQNSIKRLLPGSSDWEQQRHQLERRKEELKERLAQVRKQISREEHENRHMGNYRRIYPPEDKALLEKYENLLAVAFQTFLSGRAASFQRELNNPLKRMKEEDILDLLEQCEIDDEKLMGKTTKTRGPKPLCSMPESTEIMKRPKYCSSDSSYDSSSSSSESDENEKEEYQNKKREKQVTYNLKPSNHYKLIQQPSSIRRSVSCPRSISAQSPSSGGHPPIFCSTNDICVTAKLLHLGHIP

SEQ ID NO: 1743 - DNA, 525 bp, Homo sapiens
  misc_feature (1)..(499): Wherein any n is one of a or t or c or g
nttgggataagacattcataatatatgaacatatccaataatgggctcatagccacaatagataaagaactcctatgattcagaatgaaaggcagacaatcccatagttggcaaaaaacttgcacggacactttacaaaagaggcaataaacatataacaaagggcttatcttcaccagtcaccagagaaatgcacattaaaaaccatacacaagagttcatatgaaaatggcagacaatttgaaggactggcaacaacagggtgcaacctgaactatcactcacagctggtggaaatgcaaattggtacaaccanggttgcagagtttctcagatgatcaacgagagatgaacatgtgcatgtctcatggcaaggcaattccattgccagggggaccgccaactagaatgggaacctatgtgctctgaaatgcatacaccaggaagttcacagcaattccatttgcaacagcctcangatgggaaccacccaaatgcncacccacactagaatggatgagtaaa

SEQ ID NO: 1744 - protein, 51 aa, Homo sapiens
  VARIANT (15): Wherein Xaa may be any one of Arg or Gly or Trp
TITHSWWKCKLVQPXLQSFSDDQREMNMCMSHGKAIPLPGGPPTRMGTYVL

SEQ ID NO: 1745 - DNA, 1273 bp, Homo sapiens
tttttggcttttaaatagtcaaacgtttataataaacatattttccaatctcgaaacgactgtcagtggtaacaatgatcaacgtaacatagatgtaacaggaacatcacgacgttcgactatacttacaggaaacacaagctacagtgaaatactatctcacgcctaccaggtctgcaaaatccagcttgggcaagggtgtcgccggccccctcttatgctggtgggggagggcgatttggtaccacccctttaggggcctaaatacagccctcgcacttctgcaccaaggaatttaacctaagaaaatagtccgacttgggcaaaaaacggtttgtacaagcaatagtcaagctagcattgttcgttataaaagacagcaaaaaccctaaatttctacaggaaaggggataaagtctggtgctataaaactccgtttccggaggaatcccacctgtatctgaatgcatgggggcgctctccgagctacgttaagtataagagccccaagtaaagtaactgaccttttgcagaaacgcacgtagatgttcctgcatagactttctttgcagacccgtaagaaacgggtttccctctgccccaggggagaactgggccttggaggttaggactgggaaaaacacatcaagtcttcaccaaataccctttcaggctccttgaattttctactctgtgcacctgaacacacttttgttctcttgcaagcagttgctttgcactggaggcaatgaagacacggcggagtcccagctcgcagggagctcaggttctgacggcgtcagaggacaacacgctctggaccagcgcagcgcccaagggtcagcggcagcagcgagcagggggcacgggatgcggggaggctcttcgggaggcatgaaaggcagacgtgttccgaaacgtgagccgcgctgaggggcacggcgcacgaccggggacagaaggaagacactgcggtcgcaaagccctggccgtgcaaaggccccgtggtcagccaggagcccaggcgtcccctgctctagcgaggtttccttccgaacgtcccgtagcaccgcttaccatggaacggcgggcgctgcctcgcagccccgaccccgcggcggcccccacgggcctacgaggaactcgaggccgagggaaggagtgagagcggccggaaaggggcagggccgagccggaccggtacctggctgggtcccagcggccgccacttaccaccggtgccgcctcttcgtccagcagcctgacgcctagc

SEQ ID NO: 1746 - protein, 69 aa, Homo sapiens
MPPEEPPRIPCPLLAAAADPWALRWSRACCPLTPSEPELPASWDSAVSSLPPVQSNCLQENKSVFRCTE

SEQ ID NO: 1747 - DNA, 832 bp, Homo sapiens
  misc_feature (1)..(201): Wherein any n is one of a or t or c or g
nnggccgggcatggcgtccatggcggcggcgatcgcggcttcgcgctcggcggtcattgagcgggaaccggcctctggacgaccggggagcgaaaccattcacttacttctcgtcgctgagccccatggccaggaagatcatgcaggacaaggagaagatccgcgagaagtacgggcccgagtggcgcggctgccgccgcnaagcaggacgagatcatcgaccggtgcctggtggggccgcgcgcccggccgcccgagaccccggggactcggaggagctcacgcgcttccccggcttgcgcgggcccacgggccagaaggtggtgcgcttcggggacgaggatctaacttggcaagatgagcactctgcccctttctcctgggaaacaaagagtcagatggagttcagtatctccgccctatccatccaggagccgagcaacggcaccgccgccagcgagcccagaccactgtccaaagcttcccagggctcccaggccctcaagtcctcccaaggcagcaggtcctccagcctggacgccctgggccccaccaggaaggaggaggaagcgtcattctggaagatcaatgctgagcggtcccgaggggaggggcctgaggccgagttccagtcgctgacccctagccagatcaagtccatggagaagggggaaaaggtcttgcctccctgctaccgggcaggaacctgccccgaaggacagggaggccaaggtggaaaggcccagcaccctccgtcaggagcagcgtcctcttcccaacgtgagcaccgaacgtgagagaccccagcctatccaggccttcagcagtgcac

SEQ ID NO: 1748 - protein, 93 aa, Homo sapiens
MSTLPLSPGKQRVRWSSVSPPYPSRSRATAPPPASPDHCPKLPRAPRPSSPPKAAGPPAWTPWAPPGRRRKRHSGRSMLSGPEGRGLRPSSSR

SEQ ID NO: 1749 - DNA, 992 bp, Homo sapiens
gcccagtccggggaacaaccaacaggtcacataagcaacaagaacttccaagaggaaatggatataaaaccaaggaaagtggtagccccattgttgataatctagatacaaaataatgaaaagctagtacaaaactctttaaacatgcaactctttttaaacaacaatccatactctgaatatgtatcagagcaggttaaagactacactgctacatacccgcagtctgttccctggaaatggcgtgagggtggaggctggcacatgatgtgagagacatggcttctgccagagaagccccggacagctgcgagcgctggctgagaacgtcgctgggggccagtctttccggggtcacagccagcatgctgatgtcatggctgataacatcaccctcaatcacccaccaaaaggaacccatacggtaaaaagcggaggggggagggggaataatggagaaggagatggaaatcacttatatgatttttgtgacatggttgaaacacatcctttgaggagggggaaagttgggtggagctgggaacagaagttttatttacaagatctcctgaattattaacagaccttaaaaattccaaatggaaaacttctgttatcaaatcactgaaaatagcatatatatctggttctaccaaaaaagaaaaaaatctggcagtattgaccagtttccaaatgattaagaaaagagtgtcaagaaaccagtaaaatacataggaaaaggtggccctttttatcctcctccaccacaccactttggaaaacattttagggttcttcattgtatttttctaatacattttaccaattgtccagaaaatcaaatcccgtcttcaagacgacattacttgagctgacctgtgcaaacttgggttccgagaacagggtgtcttccccatcgtcctgcctgacatcaggagatggcagcttccccccgagctgggagggggcagcctcgtgcagtgcactgctga

SEQ ID NO: 1750 - protein, 134 aa, Homo sapiens [sequence omitted]

SEQ ID NO: 1751 - DNA, 891 bp, Homo sapiens
ttttcttaaaagctcaagccttcctgaagtcctaggattacatgcatgagctaccacacccagaccctgctcacattttatatagtaacttattttaagaatagtaaagtatttgcaaaatagttttttaatacagtaatttattatatattgaaatcaagcttgatgatatttcattaggttttgctgagtgtcatatgctaagttatttgcttatgaatttttctccaattgcctgtatttggtaagtttgcatggaaagttctgacaggaaactcagaaatatttcattgttttaccctactatcttttttgatgtgtcttaaagttgatttgctttaaattgcagtatcatcctttttttctgtacctaaatgtttttaactgaagaacacaatttccctcaaaaccctcatccctaatttagagccctcttatattaatatgagtcattttaaatgtatttcctgaaacacttctcaacttcgtaaataaaaaagagatatatcttagtccattcaggctactataacaaaatagcacaattgggtggcttataaacaacataaatttatttatcatagttctagagcctgggaagtccaagagctgggtgccagcatggttgggttctgatgaggatcctcttccagattacagacttccagcttcttgctgtgtcctcacatggtggaaggaacaagtaatctctctggagcctcttttaaaagcccaccaatcccattcattgaggattccaccccagtgacctaatcacttcccaaaggtccatctcctaatgctataaccttagaggttagggtttcaacatatgaattttgaggggacagaaacattcaggcccatagcaggatgagataaagataggaa

SEQ ID NO: 1752 - protein, 52 aa, Homo sapiens
MINKFMLFISHPIVLFCYSSLNGLRYISFLFTKLRSVSGNTFKMTHINIRGL

SEQ ID NO: 1753 - DNA, 510 bp, Homo sapiens
ggcacgaggcaagagctggttcaggtggcagccacagcagcctcagggacctcagcaactatggcctcctgcccagactctgataatagctgggtgcttgctggctccgagagcctgccagtggagacactgggcccggcatccaggatggacccagaatctgagagagccctgcaggcccctcacagcccctccaagacagatgggaaagaattagctgggaccatggatggagaagggacgctcttccagactgaaagccctcagtctggcagcattctaacagaggagactgaggtcaagggcaccctggaaggtgatgtttgtggtgtggagcctcctggcccaggagacacagtagtccagggagacctgcaggagaccaccgtggtgacaggcctgggaccagacacacaggacctggaaggccagagccctccacagagcctgccttcaacccccaaagcaggtgagagtcttccttgcctctcctgtcactctcctcctagg

SEQ ID NO: 1754 - protein, 150 aa, Homo sapiens
MASCPDSDNSWVLAGSESLPVETLGPASRMDPESERALQAPHSPSKTDGKELAGTMDGEGTLFQTESPQSGSILTEETEVKGTLEGDVCGVEPPGPGDTVVQGDLQETTVVTGLGPDTQDLEGQSPPQSLPSTPKAGESLPCLSCHSPPR

SEQ ID NO: 1755 - DNA, 994 bp, Homo sapiens
gctttttttttttttttttttttttttttttttttcttttggtaatctttattagtatatgatcatcctcaagggtctcacttgctagccttttaaacaaatttctaaggcaaatttacagttcatttaaaaggtaataaataccacacactcctacaaccttagccactttacaaaacaaaggaaaaatttcttccaaatgttattataattaagagcttttctatattaattcctcttacagtctcccagtgtgtcttagattgccaagtacatcttgattgtgacatgcaaaatggattctgctttagaaatgggttaattggcatgcagatttctgcagagatccataatcccacaaacaagaggggaaatgaacattatagggctgactctgacaacatgtacttggcaggggaaggcggcagggggttggcaacttcacaatggtggatttgggggaaggaaacaggacaagagactgaggtacccagaccctcatcctgccaacagcattcacgtagttactagcttccatgtataataagacacattttcaaaatggaaaggaggttatcagagagacggattcagatcatcagttaccattagactacagtttcattcaatttaatctttaaccattaaaaatttttaaagactatatttcaaggtaatagttcatttcaaatttaacaaattacaaatgcactaatttgtatgtatgtgtatgttctctatgtgtcatcttaaagcattttaaacatttttgataattaaaatgcaacagccatgttgaaattaatgtttacataaactgtcagtgactttattggccaagaaaaggtagctcaaagctttaactttatatgagcttgataaaagcctttcagggcatgtttgagaaatgtgctctactataaaagtaactattttaatatacagccaaggtcaattattaatatttttcttttttttttttttttgagatgga

SEQ ID NO: 1756 - protein, 80 aa, Homo sapiens [sequence omitted]

SEQ ID NO: 1757 - DNA, 522 bp, Homo sapiens
  misc_feature (341)..(408): Wherein any n is one of a or t or c or g
tccggagtacccgggaagctgggatgaaggagcctcctctgcagcctcggtggaagatggggccacgggaaagtccacagcctgggccatctccagcctcaatcaccctcctccctcacctggtccctgggctgaggatcatggcccggcctgagaacccccaaggcagcacgcagaggccgggtctgcaccgagccctgacactgacaggctgtgtgacgacgactgacaactaaccctctctggttttactttctatcacctcttaggcagagcagtgggcgcagatgccatggcgggaagcaggcctttctgaattcttagcagcgatctccaggggnactctaaccttgcaagaaagaggctgccagtcttgcatcagatgcagaaaccagggcgcagagtagnctgcccctcctgtgacttccccgtctcgggaaatggcaccatcatcatctacctggtggctccggccagaaaacagggaggcatcttttggatcatctcaacctcaaccaacca

SEQ ID NO: 1758 - protein, 70 aa, Homo sapiens
MKEPPLQPRWKMGPRESPQPGPSPASITLLPHLVPGLRIMARPENPQGSTQRPGLHRALTLTGCVTTTDN

SEQ ID NO: 1759 - DNA, 717 bp, Homo sapiens
cggccgttgaaaaatggcgactgtggcagagttgaaggctgttttaaaggacaccttggaaaaaaagggggtattagggcatttaaaagcaaggatccgagctgaagttttcaatgccctagatgatgaccgtgaaccccgaccatcattgtctcatgaaaaccttctaattaatgaattaattcgagagtatttagaattcaacaaatataagtatacagcatctgtcctcatagcagaatctggtcaacctgtagttccgttggacagacagtttctcatccatgaactaaatgcatttgaagaatcaaaggataatacaatacctcttttatatgggattttagcccatttcttgcgtggaactaaggatggcatccagaatgcatttctgaaagggccttcacttcagccttcagacccaagtcttggcagacaacctagtagaagaaagccaatggatgaccacctaagaaaggaggaacagaaaagtactaacattgaagatcttcatgtttctcaggcagtcaacagataatgctttgtttggggtatcttttgtcttaaaattgtattattaattaaataacttatttattgtcccaatgttaccaaaatgcaccactaatgtttgtagaaattggagtttctacaaaacacccctcatgtttaactacatttgtgaataaaagctaactcttgtcatctaaaaaaaaa

SEQ ID NO: 1760 - protein, 174 aa, Homo sapiens
MATVAELKAVLKDTLEKKGVLGHLKARIRAEVFNALDDDREPRPSLSHENLLINELIREYLEFNKYKYTASVLIAESGQPVVPLDRQFLIHELNAFEESKDNTIPLLYGILAHFLRGTKDGIQNAFLKGPSLQPSDPSLGRQPSRRKPMDDHLRKEEQKSTNIEDLHVSQAVNR

SEQ ID NO: 1761 - DNA, 2223 bp, Homo sapiens
  misc_feature (101): Wherein n is one of a or t or c or g
cagccgcggccggcaggacaggcagacggacaggctgacaggagagagaacaggcactgcgggacctgcaggagaaaggcgatcctgtggctgggaatgtnaccccacggccagaagaggacccggtatcctcaggtccgagcccctggacagcagccccaggcccagctggccatggccctgtgcctgaagcaggtgttcgccaaggacaagacgttccggccgcggaaggcttttgagccgggcacacagcgctttgagctgtacaagaaggcacaggcctctctcaagtcgggcctggacctgcgcagtgtggtgaggctaccacccggggagaacatcgacgactggatcgccgtgcacgtggtggacttcttcaaccgcatcaacctcatctacggcactatggcggagcgctgcagtgagaccagctgcccggtcatggccggcgggccccgctacgagtaccgctggcaggacgagcgccagtaccggcggcccgccaagctctctgcgccgcgctatatggcgttgctcatggactggatcgaaggcctcatcaacgacgaagaggtctttcccacgcgtgttggagttcccttccctaagaacttccagcaggtctgcaccaagatcctgacccgcctcttccgagtctttgtccatgtctacatccaccacttcgatagcatcctcagcatgggggcagaggcgcacgtcaacacctgctacaagcacttctactacttcatccgcgagttcagtctggtggaccagcgggagctggagccactgagggagatgacagagcggatctgccactgagcccaggtctggacttttttggccatcagatggacgatctgaacatagggtggctggcagaggggacccccaggagcctgaaggaatctgaaggcactggaatcactccacacacccaaagcctctggacttctggttctcaggagtctgcctacctgtcgccctgaccgcttgtggatggagaaggggagagcatctaggcaggcaaacagaagggaagtggagttaaacctctggcatgaagtctgggagtagggtaggctagggggtttcttctatgacacttgacccttccatgctggttcccaagcctattggaggaatgtgggtgtggccgaggtgatggcaagaaaggtgcaagaaagtgagcagtctgcctgtgagtgagcacagatgccggggtgtgtgtgtgtgtgtgtgattttcactgtggggtgtgtctgtgagagctagctgccttacccctccttggcacatagtaggccttccataaatgttggatggatggataaatagattgggaccatcagaccatgggaccatcagaccatgtccactgtaggagtgatgacagctcagcgtccccactcagtgtatctgaccatgtgtgtaagtgcacaaaaatgtggttgtagatgttgctctacattcaaaccttccaggctacactcttccatcagcatgagtcctggagagctgggggaaggtaggaagaggagccttgccttgagttcctaaaccgacccactgcagacacaggctctgattctcttacccagagatgcccatgagctgacattttactcatccctctgcctccaagaaggcctgtattatacgtgtcctcctgggggttggagatgatccctcaagtacacaaaggtcccctggcccttcatctgggaatcatatactccactctagctcccagaatctacagacctggctcctcggatctgaagcccagcacaaaataatctccccgtccaaggagcttgtggaacttgaattgggaactttggagtcttgtctcccatcccagcacattgaggatgtagttggtgaatggactcttccaggcatggagatcctccatcctaaaagtacctgcctccttcccagccatccctgacacattccagccagttggatctcacagcacagctatccacagggagactgggatgttcacgcagcactccattactcagtacctccatacccagccctatacgcagacccacaggtggggaaactgaggcaggaacagggttctgccctcccagagcctccactctgggatgccagaatggaaagccagagggaacctgagaatcatccagtcttactgtctcaatgtacatacggggaaactgaagccaggagaagaagagggag

SEQ ID NO: 1762 - protein, 274 aa, Homo sapiens
  VARIANT (34): Wherein Xaa may be any one of Leu or Ser
QPRPAGQADGQADRRENRHCGTCRRKAILWLGMXPHGQKRTRYPQVRAPGQQPQAQLAMALCLKQVFAKDKTFRPRKAFEPGTQRFELYKKAQASLKSGLDLRSVVRLPPGENIDDWIAVHVVDFFNRINLIYGTMAERCSETSCPVMAGGPRYEYRWQDERQYRRPAKLSAPRYMALLMDWIEGLINDEEVFPTRVGVPFPKNFQQVCTKILTRLFRVFVHVYIHHFDSILSMGAEAHVNTCYKHFYYFIREFSLVDQRELEPLREMTERICH

SEQ ID NO: 1763 - DNA, 1439 bp, Homo sapiens
  misc_feature (1)..(781): Wherein any n is one of a or t or c or g
ntgaggcccttctttggcatcgtccccgtcctcatggatgagaagggcagccgtcatggagggcagcaagtctccggggccctgtgcatctcccaggctnggccgngcatggccaggaccatctatggcgaccaccagcgatttgtggacgcctacttcaaggcctacccaggctattacttcactggagacggggcttaccgaactgagggcggctattaccagatcacagggcggatggatgatgtcatcaacatcagtggccaccggctggggaccgcagagattgaggacgccatcgccgaccaccctgcagtaccagaaagtgctgtcattggctacccccacgacatcaaaggagaagctgcctttgccttcattgtggtgaaagatagtgcgggtgactcagatgtggtggtgcaggagctcaagtccatggtggccaccaagatcgccaaatatgctgtgcctgatgagatcctggtggtgaaacgtcttccaaaaaccaggtctgggaaggtcatgcggcggctcctgaggaagatcatcactagtgaggcccaggagctgggagacactaccaccttggaggaccccagcatcatcgcagagatcctgagtgtctaccagaagtgcaaggacaagcaggctgctgctaagtgagctggcaccttgtggggctcttgggatgggcgggcacccaagccctggcttgtccttcccagaaggtacccctgaggttggcgtcttcctacgtcccagaagcagcccccaccccttnacgtgaagctgggctgagagccctttctcccatctattggaggtcccaggagtgtcacccatggagaggctatgcgacatggctagggctggttctgccatctgagtttggtttcctggaatgaaaaggcattgccatctccattcctctgccctcttgagccagcacaggaaggtgaggccctgggatagcgcgcctgctcagataacacagagctagttagctagtagcaaccgtgttttctccagatctgtctagatacaaaggtcagaaatcttatttttatacttttatattgtggaagaacagcatgcaacactcacatgtagtgtgtggatttacttgaacatgttctttttaacatgtagttatgaaaatctccttttttgcctctactggtgaggaaacatgaggatcagaggccacatttttaattattgttagtgtatttggaagtctgaattggagatgtttgtacctctgtctaaacagttcccttgaggacttccaacgccggcatcttttcctggtgagtgtttctcctgtgcttggttgtgtataatggagctaactcctaagcggtggggtgaatgtggccgccttagttctgaagctactccagttatgttctggatcacagcttgaagaaacagtcgac

SEQ ID NO: 1764 - protein, 220 aa, Homo sapiens
  VARIANT (1): Wherein Xaa may be any one of Leu or Met or Val
  VARIANT (34): Wherein Xaa may be any one of Arg or Gly or Trp
  VARIANT (36): Wherein Xaa may be any one of Arg or Cys or Gly or Ser
XRPFFGIVPVLMDEKGSRHGGQQVSGALCISQAXPXMARTIYGDHQRFVDAYFKAYPGYYFTGDGAYRTEGGYYQITGRMDDVINISGHRLGTAEIEDAIADHPAVPESAVIGYPHDIKGEAAFAFIVVKDSAGDSDVVVQELKSMVATKIAKYAVPDEILVVKRLPKTRSGKVMRRLLRKIITSEAQELGDTTTLEDPSIIAEILSVYQKCKDKQAAAK

SEQ ID NO: 1765 - DNA, 748 bp, Homo sapiens
  misc_feature (1): Wherein n is one of a or t or c or g
ncacgggaagccattccgggtgcctcggcagcgtcctgggtgcacatagtgcctactttgccaacatgctggacaccaaatggaagggcaagagtgtcgtggttctcaggcacccactgatcaaccccgtggcctttggggcctgctgcagtacctgtacacaggccgcctggacattggcgtagagcatgtgagtgactgtgagcgcctggccaagcaatgccagctgtgggacctgctcagcgacctggaggccaagtgcgagaaggtgtctgagtttgtggcgtctaagccaggcacgtgtgtgaaggtgctgaccatcgagcccccacctgcagacccccgcctccgggaggacatggcgctgctggccgattgtgccctgccccccgagctccgaggtgatctttgggagctgcccttcccttgtcctgacggcttcaacagctgccctgacatctgcttccgagtggctggctgcagcttcctctgccacaaggcctttttctgtggccgcaggactacttccgagccctgctggatgaccacttccgagagagcgaggagccagcgacctcagggggccccccagccgtcaccctgcatggcatctcacccgacgtcttcactcacgtgctctactacatgtacagcgaccacactgagctgtcccccgaggcagcctatgatgtgctgagcgtcgccgacatgtacctgctgccaggcctgaagaggctgtgcggccgct

SEQ ID NO: 1766 - protein, 97 aa, Homo sapiens
HLLPSGWLQLPLPQGLFLWPQDYFRALLDDHFRESEEPATSGGPPAVTLHGISPDVFTHVLYYMYSDHTELSPEAAYDVLSVADMYLLPGLKRLCGR

SEQ ID NO: 1767 - DNA, 1135 bp, Homo sapiens
ttttttttttttttttcctccagaagatttttatttttaaatctaaaagaatgaatgtttagaataatcttcagctactgtcagcagatgggggaggtattttaaagcagaagagccgttacctaaggacctattagtcttcccaaagtagatgactgtctacttgtagggccagatcaacttctgaaatcaaagtttcactttaaagcagttttttctcagcacccaatggttcaaataaactctctgagacactttgttggtacagattttaaattacaagcttgatttgataccctcaaatacagttcttaaggaagattagttacaaatagttgtcagtactttcaaatgacagaaaaaattacattttagtaaaactggatgaatttttcatgtgtgaaataacaatcctttcaccaccaggtggaattactccagttcatgcaatagataactatgacatttttaaaaactgccctaatttttctagttgcgatttcatgcctattgtaagtcaaaacatcgttatgttcccgagctcacctcaccctccctgggaagtggcgaggacacccatggtttctctgagacaccactgggcccctgcttagcaagctattgtctcagtgctttcctcttgctgcgaaggtccccaggagatgttgggttcagaggaagtggctctggttgcctatgggcaaatactacaccagaggttacacaggatagagacccaagaggtgaacaggagggaagttttaacttattttgacataaaattggcaaaaataagcatcaccaaatttctgtaactagaaattgaggataaaacagaggaggtttgtctatgatgaggatgtccatcacagtagaacttgtgaatagcttttatagaaccacttaatatagtaccgtcaacattttacatattttacatacaatttgaatacaaattcttaaaatttataatagaacattaaaataatcttctaataaaatcagccttaagtataaggaatctaaatttcattatcttgtacatttctaaataaatatctttgatctataacccttgaaaatattacagtttatggtgacatgatagagacaagtcaaacagtattataagtga

SEQ ID NO: 1768 - protein, 72 aa, Homo sapiens [sequence omitted]

SEQ ID NO: 1769 - DNA, 646 bp, Homo sapiens
  misc_feature (1)..(519): Wherein any n is one of a or t or c or g
ncagtgagtactcggtgtgcagcagcatcttgccctgccgctcttcctggctctctatgccttggtcccccctctcctccagggtcaggatcttcagctgatagaagtcatccgtgccatctttcctcgccaaacactgcactatgcttggcaccggtgagttgcccagacggggaccaaggatgaatggtccagctctctttgcattatttccagaaatcccacttcctagagccttggccctggccgacgtttccccagctcctctgtctgatgctctccgcttcattctcagctcttcgccgggtggtcagagctattcgcccatagtccgtagcccagagccggggctgctcggctctccctcccggggggccggggccgggctggaggcgtgcgagcctctcaccgccgcctccagcgcagccacccgagccgccgccgccgccgccgccgcctccctccatggctgcggcgccgccacctgacaacggaagtgaggttcctcttcnntcctnnctagacttagctttggccccgcccccttaagctgcttcccctcgcctgcgtctctagccccacggctttgcggattggggcgccatcttgaccatgggcggaagacttcaggcaagaggccagagtc

SEQ ID NO: 1770 - protein, 72 aa, Homo sapiens
  VARIANT (61): Wherein Xaa may be any one of Arg or Gln or His or Lys or Pro
  VARIANT (63): Wherein Xaa may be any one of Cys or Leu or Phe or Ser or Trp or Tyr
SVAQSRGCSALPPGGPGPGWRRASLSPPPPAQPPEPPPPPPPPPSMAAAPPPDNGSEVPLXSXLDLALAPPP

SEQ ID NO: 1771 - DNA, 1444 bp, Homo sapiens
  misc_feature (1)..(2): Wherein any n is one of a or t or c or g
nntcatgacttcagcgataagaccgctgacctcatcaacctgcagcactacgtcatcaaggagaagaggctcagcgagagggagactgtggtaatcttctacgacgtggtccgcgtggtggaggccctgcaccagaaaaatatcgtgcacagagacctgaagctggggaacatggtgctcaacaagaggacacatcggataaccatcaccaacttctgcctcgggaagcatctggtgagcgagggggacctgctgaaggaccagagagggagccctgcctacatcagtcccgacgtgctcagcggccggccgtaccgtggcaagcccagtgacatgtgggccctgggcgtggtgctcttcaccatgctgtatggccagttccccttctacgacagcatcccgcaggagctcttccgcaagatcaaggctgccgagtataccattcctgaggatggacgggtttctgagaacaccgtgtgtctcatccggaagctgctggtccttgacccccagcagcgcctggccgccgccgacgtcctggaggccctcagtgccatcattgcatcatggcagtccctgtcatctctgagtgggcctttgcaagtggttcctgacattgatgaccaaatgagcaatgcggatagctcccaggaggcgaaggtgacggaggagtgctcccagtacgagtttgagaactacatgcgtcagcagctgctgctggccgaggagaagagctccatccatgacgcccggagctgggtacccaagcggcagttcggcagcgcaccaccggtgcgacggctgggccacgacgcacagcccatgacctccttggacacggccatcctggcgcagcgctacctgcggaaataacagcctcagccggggccaccagcactgctgccacttcttccagccccagccaaaggcgtggctgtcagggctgggccctgtagtgctggactctcccgggccacaatagggacagggcagggacagggacagcccaggtcacacgtggggtcagcagaggtaccacgaagctaccttttgggatgattgctcgattgtttggtttttaaatctgagaagcctagataactaatctgcttttaatcacgatgttttaatctacctctgtctctttaaccatgctgtctctggactgagcaagagggaggagggagcctgctcaccccactccagggccttccccagcggccaccaactgacctggggcgctgctccccacagtccaaataagctgaaagtgcagctcgctgcaggccccagagcgagcttcccctcctccctgctctcccaggcccctgccacagcctctttccgtccctctctttctgatccaggcccctcagtccaagctttggaaaaccttcacctcatcttaaaccgaactcaaatatatttatttttttaccatacc

SEQ ID NO: 1772 - protein, 290 aa, Homo sapiens
  VARIANT (1): Wherein Xaa may be any one of Ala or Arg or Asn or Asp or Cys or Gly or His or Ile or Leu or Phe or Pro or Ser or Thr or Tyr or Val
XHDFSDKTADLINLQHYVIKEKRLSERETVVIFYDVVRVVEALHQKNIVHRDLKLGNMVLNKRTHRITITNFCLGKHLVSEGDLLKDQRGSPAYISPDVLSGRPYRGKPSDMWALGVVLFTMLYGQFPFYDSIPQELFRKIKAAEYTIPEDGRVSENTVCLIRKLLVLDPQQRLAAADVLEALSAIIASWQSLSSLSGPLQVVPDIDDQMSNADSSQEAKVTEECSQYEFENYMRQQLLLAEEKSSIHDARSWVPKRQFGSAPPVRRLGHDAQPMTSLDTAILAQRYLRK

SEQ ID NO: 1773 - DNA, 764 bp, Homo sapiens
tttgagacagagtctcactctgtcaccaaggctggagtgggggactccatcttggcagggggcgggggatgtggaccttcaagtctcagaaatatgtgtttgtcttttgatctgctgatttggtgtaacgtgattgcctcattcattccagtgtacgtacttgctgtaaatttatatacagaattaaatagcccatttattaatttataaaccataataaaaccagacagtcatttcccgtcaccagcagatcttgcattggaaaaggaaaataatatacaaatttcagcaacttcagagatttcaggaagcctgaatggaggtcgaattcattttggagttcaataatatgttcaaagaatcaggtactatatataatcatatagacaactcccgtaatatctccgcagtgcaaaattatccctgtttcttgtcattcaccagtgagaaaaatccaactgcagacttgactgccttcggtgaaggcacacggcaagttcttctgacaaataacaccctttgggattgactcttcccgttttacacagcaattgtctcagcttgggaccaaagtatttacaaagcaagcaaacaacagactagcgaacagggacacttctgaagctggtgatgcagaaatccactgccaagcagggtggggggccagtcacctctcctggaatgttccatatgtaagctgacacaacttaacatcttaaatacagaattccaatcaaaagaaaagcaaacaaaagacaaaaaaa

SEQ ID NO: 1774 - protein, 70 aa, Homo sapiens [sequence omitted]

SEQ ID NO: 1775 - DNA, 642 bp, Homo sapiens
aatgttgtcaagagaaaaaaaaaatccaaccttcattccaagacatttcttcaagatatacttgagcatctactggtcctacatttcttagatcatcttcacaccgctgcaggtcatactctctttttgtctcttcatttcctagaattttccatgcttgatcaatttcgatgaacttctgtacacattcctccactgttcctgctggtacatctgtactttgtttatctggatgatactcaaatcttcagagggaggactccagaatctctgtttcaccaagctctccaagcaactgttacgcgtgctaaaatttgagaagcacactgtttgccttgactgcttaaaacaaggaattcatgggcaagtcagaagatgagtgcttcacaaaaattttcctgtgacagatgcgtccttccaagtatgtacaccaaaaagagggggaaaaaatccaataaccattaatatgagtttttgatatttttgttttaggtctgatatatttgcagatgggtctgctcccaggatgctgtaccaatccttttttggcatctgctcaaccgccatcatccatggaaccagaagtgggccttctcagattagctaacttcacataggcgctgctacccactcctcgcctgc

SEQ ID NO: 1776 - protein, 61 aa, Homo sapiens
MMAVEQMPKKDWYSILGADPSANISDLKQKYQKLILMVIGFFPPLFGVHTWKDASVTGKFL

SEQ ID NO: 1777 - DNA, 574 bp, Homo sapiens
  misc_feature (559): Wherein n is one of a or t or c or g
aagcttccaaagctggcagggaaaagggtgggtcctgacccaaggaaagccaatctgtgagccagccaaaagctggttagtctttctcaaacaggaaaaatggcaacagactggactgacaagtttctccctgccactggactctaagaagaaacagaaaaaaacccagaaagttggtgatgggaagggaaagtgaaaaagaaacagaaaggagacaagggtgagtccaaagctgtaggttagaaaagttgtctgtgagaaggccttgattgggttaaaaacaggggccttaaccagaaggtgggcttgcttgcttattaggcaaggaatcaaggacaggaggaactcaggaactataactgacaggggcatcaccttactcttgctgctgagagggcaacacgatgcttcagttctttgatatggaatggatccttccaattcctagactacatactgtcccacccctgtgaggcccagttatgtatctgagctcataggagtccagtttctgttagtgccatgggcggctttaaataggcctcccttactgtggagngaacctggggagtga

SEQ ID NO: 1778 - protein, 124 aa, Homo sapiens
MPLSVIVPEFLLSLIPCLISKQAHLLVKAPVFNPIKAFSQTTFLTYSFGLTLVSFLFLFHFPFPSPTFWVFFCFFLESSGREKLVSPVCCHFSCLRKTNQLLAGSQIGFPWVRTHPFPCQLWKL

SEQ ID NO: 1779 - DNA, 620 bp, Homo sapiens
gtgcacaggtgttgtacaaaaagtacatgacctccctgctgtttgtgagtgaaaaaggaaaacccaaatatttgtgaaagtgtaagacggatgcatttaaaattctggggtctagcaagggaaagattctctgtgaagacccaaaattgaggactggttttataactctaaaattatcttgaggaatggaatcaaaatatggtatttcattgattctaagatgtatttttttcatactttagcatcttaaattcagatgggcttggccatcaatagtctgtcccaagtttattggcaactcctcgaccccaccttcttagtgcaacataaaataatggcatgttttacaatcagtggctccttaaattagattaaacatcatgctctgtagttcagcatacacagggatccacataaaaataaatctgacatttaaaccctggtgattctcccaactgaaaaagtgctggcaaaaatatttggcatcttaaatttcagcatgagcatcacaacttcaggaagggttagaagaatagtgatgtgggttgggctcaggctctaagttcctggttctgtcccctcatccagctaggaaaactggtaaggaaaattaaattaac

SEQ ID NO: 1780 - protein, 78 aa, Homo sapiens
MKKIHLRINEIPYFDSIPQDNFRVIKPVLNFGSSQRIFPLLDPRILNASVLHFHKYLGFPFSLTNSREVMYFLYNTCA

SEQ ID NO: 1781 - DNA, 484 bp, Homo sapiens
agatctcactgacacccagggtcctcttccaagctcactggaggtcggaagagtccacctcctggtggctgtggactgaggccccgtgtcctggctggctgttggcggggatggctcttggcaccgagaggctgccctcgggtcctcgcttcatgcccttctcctggcacaccctggctttttgcttctccaaggccagcaggagggtgagtggctcacctgattaggccaggcccaccccctcccttttgatgaactcagcgctaaccgatctggggcggtcatcacagctgcaacatcccctctgctgggattctgacataatggcaggagtgacacgcacggcagtcccagccctacccacactcgaggggagggaagagcatggggcgtgcggagcaggggctggaagctcagggagccaccctggaactctactctgccacactaacaggctcagatgatttaatcccagacaacagcc

SEQ ID NO: 1782 - protein, 70 aa, Homo sapiens
MNSALTDLGRSSQLQHPLCWDSDIMAGVTRTAVPALPTLEGREEHGACGAGAGSSGSHPGTLLCHTNRLR

SEQ ID NO: 1783 - DNA, 334 bp, Homo sapiens
agataaggagatggagataccagtcacccctatcaaagtggcaagtgggagggggatgctggttggtctgtcggagctgacgaaggaatgggattggaatgtttcttttaccaattatgtaaacacagcctggagttccgagatgagtccatctcacttgctcagaactttgcctggtgagagcggttacaagcgaacaaggtggaaatgaaagaaaccctgactttcccactaggaaggaagagactgttccttcttgtgatgtactctgaagaaaaattctaggatttggacagatttcttgggttataaaacatgattttcttctctgttt

SEQ ID NO: 1784 - protein, 66 aa, Homo sapiens
MEIPVTPIKVASGRGMLVGLSELTKEWDWNVSFTNYVNTAWSSEMSPSHLLRTLPGESGYKRTRWK

SEQ ID NO: 1785 - DNA, 454 bp, Homo sapiens
tcatgacggttgtcggcgcgggccctagcgtggcggcgctgcagtctgggcagtgggttggttcctcctcggtcctctgtcgagtggcgacagggcctagccacctggcgggggtgaccttcggacgtgcgacccgctcggagaagggagggaactgtggcccgcaacaaagcagtgacaggcccgacatcccctgcagcgcgatctttccctcagctgcctgccggagaagggcctttctgtttcacagggctaaagatggggcgcggttcctccacggggcggctgccgggtgaacggaacggggatggaggcgctgccagaagagcccgagctcgagcccgccctgccctcggcctccccgccgcgccgctccgcagatgccccgctcctctcctgctcgctccggagaaccccaagttccggcctgaacctcggccctcgcggtcaggcg

SEQ ID NO: 1786 - protein, 97 aa, Homo sapiens
MTVVGAGPSVAALQSGQWVGSSSVLCRVATGPSHLAGVTFGRATRSEKGGNCGPQQSSDRPDIPCSAIFPSAACRRRAFLFHRAKDGARFLHGAAAG

SEQ ID NO: 1787 - DNA, 1151 bp, Homo sapiens
tttttttttttttttgaaatcgtctcaattgtttattcgactcacagtcagtgcacacactctaccatccaaaagtcgaagctgtgacaatcgactgctacaggcagtgcatggatgtgtaaacaaacacaaatgaaaatgcaaatcagagtgggcggggccaaggcccactgttacattcacagcacagggtaagtgcaaaagaacaggatgtcaggatggggggcggggagcacagggtccttcctgccctggaggctgcctccaggcatcagcctgggaggtgggttagtgcccatggaaccctcctgcccaggaagctgcctccgggcatcagcctgggaggcgggttagtgcccatggatccggtgtctgggaaggggcccacagaagatgggccacacccagcatcatctcctctctgtggtgcgccctcccatccccagacccctttcccattcaggggagaggggccctggtcacaggagccagtcctctgacctcctgagtgtggaaacccaggaggggagtgtgtttctcctgcaggcctctcaacctggaaagggcagagccacagcagaacgcgttggggccacagacactcgctcaggtgaagacactgagaagacactgccgggctgacaggaccccgcggcggggggacgtcgctgctaacaggactctctgcaggcccaggggaggctctgcccccatgaggccccaggagcgtttgtgcgttgaactgaaggcaaagtgctgggcagtttcttgtcctaatgaaggtggggaagctggtccggccacatacatcctctgacctcccccaagtggtccccgggcccacaggtgacaggggcctgagcgatccctggtctgagcccccagctcagagcctagcaccacccagggaggtctgggctcatggaagggggatgggcgggggcaggagggcccagccccacctccgcccgtctttggtggtgacagaggtgggaggagaaaagacgatctttggtagggcgagggaatgtcaaaggacactgtcaagggcccagttcctgctcagaagagagcacaggagtgggaggcccacctctgccccatctctggatgcccagcctgctgcccactaagtggccccactctccttc

SEQ ID NO: 1788 - protein, 118 aa, Homo sapiens
MKVGKLVRPHTSSDLPQVVPGPTGDRGLSDPWSEPPAQSLAPPREVWAHGRGMGGGRRAQPHLRPSLVVTEVGGEKTIFGRARECQRTLSRAQFLLRREHRSGRPTSAPSLDAQPAAH

SEQ ID NO: 1789 - DNA, 723 bp, Homo sapiens
tccggagagcggatcgcggggcgcaggagcccgatcgcgctggccatggcctccaactttaacgacatagtcaagcagggctacgtgaaaatccgcagcaggaagcttggggcatataaggacgaacccacgggaaaagctgcggttctccaggagtctggttgttcctcgcagccgggacggaatgctcaagtctgtcaccacacagctgtcagccaagggaggtgcagagctggaggtggaagggagtcgtcttcttagcttgacctttgaagccctttgctttacgactggatgcttgatcatttttctcggcctttgatcttcttgaaatcgcaattgtatctgatgcctcagactatataaactaatggatgagttaagtcccagacaagatgtatgtctgcgttcacagagtcacctgcatatgaaaatgagactgaagaatgtagcctgagcatccccttcctgcgcacttggccctggagtctataggattcccctccaccccatccaagccctccaggatttcacacaacaaaaactgagtatgtaacccaattataacatagggcccaaggaaagtgcattgattgcttcttgggtaactatggcattcacagcgtttgaaatgtcatcttgaacgccatttctgcctaacgatgtgtgcaaatgtatatttacacttacaaagcctcttttgctgtgttcactgtttagagc

SEQ ID NO: 1790 - protein, 102 aa, Homo sapiens
MIKHPVVKQRASKVKLRRRLPSTSSSAPPLADSCVVTDLSIPSRLRGTTRLLENRSFSRGFVLICPKLPAADFHVALLDYVVKVGGHGQRDRAPAPRDPLSG

SEQ ID NO: 1791 - DNA, 990 bp, Homo sapiens
taaaatatttaaagacatttattctgagccaaatgtgaggaccatgacccatgacatagcctcaggaggtcctgagaacatgtatccaaacacagtggttgggttacagcttgattttacacagtttagggggacagaatttataggcagacatcaatcagtgtatgtaacgtatatgttcatttggtccagaaaggtaggacaacttcaaggagggtgttgggcttacagctgatagttgaattcaaaggtgttctgattggcagttggttgaaacagttaagtttctttctaaggagttaagacagaaatgcttagggttaagataaggagggttgtggaggccaaggttcttgttatgaagatgaagccttctggtagcagccttcagaaagagtaataggtggtaaatatctcctatcagaccttaaacggtgccagactcagttgaatatctcctggatcaggaaaagaccttgcttcagggacaaatttgcagtggtgatgaattcctttcattcttagctttcctcctattacttccctgatttattttacttacaaatgacacgtctaaatggcagagacctgaagttctcttgatggggtgctgagatgttcagaagggaggtatcctgtttaaccaacagatcatttatagataaagagaggctctaacttagcatacagttcatctatttccttcccccaagaaagaagggatatttacatctcctctattccttcttccagggcaagaatcttctgttccatatgcaacatcttctggcagccttgtccttttttctgtccttgacgactacaataacaaacagctgttgccgaggcattgctgttgacgtgttacctttgaaacctccctcctgttatggaataagcctcttccagatcatggatcattatcatctagtctgacaagcagccttgttgccacggagacccaaagggatcaggcgtggccatttgcct

SEQ ID NO: 1792 - protein, 63 aa, Homo sapiens
MTHDIASGGPENMYPNTVVGLQLDFTQFRGTEFIGRHQSVYVTYMFIWSRKVGQLQGGCWAYS

SEQ ID NO: 1793 - DNA, 1234 bp, Homo sapiens
  misc_feature (16): Wherein n is one of a or t or c or g
ggccccgtcagccatnccgctcggggtgcgccgcccttcgtctgggtctccgcccccaggacccgcggccgagagctccggagcgcggcttccccggccggctgcgcgatgggctgcgggaactccaccgccaccagcgcgggcgcgggccaaggccctgcaggagcagccaaagatgtaacagaagaatccgtaacagaagatgacaagaggagaaactatggaggagtatatgttggcctaccatctgaagctgtcaatatggtgtccagtcaaacaaagacggttcggaaaaattagaagaaaataacatcatgactcaagaatcaagagcttgctcatcagtttggaaggaatttggctccgtgggacgttgtaatgtgcacagacatttccaaggaaattctaaacagtcacccttcccttttgcattcccccaaatcttaagtgtatacataaaaccctgggtacatattgttgtggtaatagaagggaattggttaaacagtacacttgtttatggaactttctgtggccacctacgaaagacaagttaacaaactgtcatggaggctgttgttgcccagccagggccgctgcattttgacaacatttccaccctggccactcagcacatttcatggaggtcatgtcttttcactgatacttttttgatagtttttatataacaaaatccttattctatttataacttaagatgataaggcactataaattaatgacctaaaataatatatttgtctgttatcttttgctatttctacttcactttaatttttagctgtaaaattggtaaatggattcttacaactatctctttccatttcttactatttggttttcaaatttcatttaaatgtcagaatttccttttttaggaacaatgtgtatttcattgcactatttaaaaataaactcaaatttgcatgccatatgcacattttgattacatttttattttctttcgtgaaaggcatgtgcaactacaaatacttcatagctgtttgggttgctcattctacatcacgacaatctcatcatattatttctataacttttcaaggacttgcgatggatggttagtgggatatctggaaattaatttgataatgacttgtgtatctacttagtattgcaatgtaagttactcaattcaccaatgtatttcaacaattaaaacatttttatccctcttcaaaaaaaaaaaaaaaaa

SEQ ID NO: 1794 - protein, 80 aa, Homo sapiens
MTQESRACSSVWKEFGSVGRCNVHRHFQGNSKQSPFPFAFPQILSVYIKPWVHIVVVIEGNWLNSTLVYGTFCGHLRKTS

SEQ ID NO: 1795 - DNA, 418 bp, Homo sapiens
acatgctttagaaagatgagtgtggggaaaatttgatgttccttaggattatataactgaggagggaacattgcaaatagggtctgaggctttgtttctctcttgctctgaaacatttctgaaaaggcaaggaagggaggggtagtgtctggggcagtgctggtagcctgcatgtgttgtaaatcatcctgccataacaaaggactgcattgttctagctggcccactgggcaggtctgccaggctacttggaactgtagtgggaaggtggttgattggagggttatctgtatataaaaggttttctcccctccaaagaaagactccagtacaagatacctggtcccagggagtctaaattgtaacagcaacccctgtggactttgtgggtatgagttttgattgaaatataaagctt

SEQ ID NO: 1796 - protein, 59 aa, Homo sapiens
MIYNTCRLPALPQTLPLPSLPFQKCFRAREKQSLRPYLQCSLLSYIILRNIKFSPHSSF

SEQ ID NO: 1797 - DNA, 530 bp, Homo sapiens
tgtacagataaacagtggtataccaaggatggaggatggggagagttgtccatcaacgtgaggaatattttatcactgacattgcttagaactgtcagtgcatggtgataataaaaagcagaccgactttttcttgtatctattattgttttaaagttctccatgacattgcacatcgttatttcttgcattcaaggcaaagcactccaacctcctttggtactgaccagctctctgagtctttctgtgttccaagtgaatctgcacattgcaatcattttcatcaatagactttgatttctcaatccataaaacggcatccacaaagcagaaacaatggaggccaggggagatttagatatcatttagtccaatcctctcatttcacagtgaaggagataggtggagataggtgatgtgacttgtccaagttggtgccagagctaggtcttaacctcaagtctctgattctctacatccaggattgtatctagtacagaaaggggcagagctagctcaaaattttacag

SEQ ID NO: 1798 - protein, 63 aa, Homo sapiens
MQEITMCNVMENFKTIIDTRKSRSAFYYHHALTVLSNVSDKIFLTLMDNSPHPPSLVYHCLSV

SEQ ID NO: 1799 - DNA, 610 bp, Homo sapiens
ttttcagccaatcagctgactgcacaaactgcatggcattgagtaaaggaagaacattctggaagttttttttttcattctgccctcattctgttggtttctcagttttacggatgcagtgtcatgcgcagaaccctgtaaatgagcatagttcgtttaagtatataaagtgctttcggtggataaaatgaattttaacaggcttaagtgatgtgcctaaatgcacacaattaatgcatggctggaattcaaaatcatgtcttttcctctgttctgattgttttataaatatgggttgttttaatgtgtggctggaattcaaaattgtgtcttttcctctgttctgattgttttataaatacaggtgtagtgattgattttctacccaccatgacagggaataggttcaaaacttaaaaccctgtttgttttataattaggtagactcaaatgacaggtcaaggcagggaggggagccagtcatttttactcccatatgggtttgctccttcaaagacaggattggggtagcagtgtcagttcctacaggttataacgatcttaatgataaacttaaataaccgtaactgaatacttataatgtgctagc

SEQ ID NO: 1800 - protein, 52 aa, Homo sapiens
MALSKGRTFWKFFFSFCPHSVGFSVLRMQCHAQNPVNEHSSFKYIKCFRWIK

SEQ ID NO: 1801 - DNA, 1236 bp, Homo sapiens
agatctgtggcataatcaggcttcctaatcctgaaccaaagttgttgttgtatctcgtagttgtcacctgagagctgactgacctgtttcaagcatatgtgagatgccttctggaaatgcccggaagcatatagctaatgggatgaggcatttcaaggttgaacttcagcaagagcaagtgggataaagggcaaaaagcagcacattcctttcaaaatgtccccattttaaactgcaggctagagtagacaatggaaatatatgacatataaagaaactggtgagattattaagcagagggccttctggggagcattaaagagtgagcaagaaaaatttctcagacatggtgattctagaattgaaaaatcatagactctttctcttctctctcctttgagagtttccagatgaattcttggatctggctactgagcaaatatatgaataataacctaggatcagctgggtataagaggtttccaccagaagtccatgaaaaccaatgtttttaagcatctattgggcaactaccataaacaatcagcaagatgtttaaacagttgattctgccggcggcccaaccagtttttaactgtatcacgaaaactggcctgggggtacagtctgagattattccagccctgcttttacaccgccagaaattccctttctgttacaaatttctaccccagagaggtttgcatattcttggcattttcactgtgcatcagtgaatcagctagcctacgggccaaggagaggggaaaaaaatcccaaataaaactcaacccagttaggatgtcttcatctatttttcagtgggaaaaaatacagctggactcagtgacttcagtcaaaagcaaacattactagttgcttcatttttctaatttttatttttgactctcaagttttggagggcataataaagacatagcctcagcaaagtcacttagaagattgagttcgttattttgcaaagcttgggtagtgacacttctgcaaaatgcacaagcacatgagcagagagatgtgtgaattcaggaaagcagccaaatgcacatcagagctgaggaatgtcacagcgaaatgaagaaaacttgtaaacacctatctgtatttttaggtagagaatgttctaacatattgccaatgggtgctgcctgtgtgttccttcccctaagctttaaactcaactgatattaaaggtgatttgaaaacaaaaaaaaaaaa

SEQ ID NO: 1802 - protein, 61 aa, Homo sapiens [sequence omitted]

SEQ ID NO: 1803 - DNA, 162 bp, Homo sapiens
  misc_feature (23): Wherein n is one of a or t or c or g
gagcaaggaccccaggtaacatntggtgaccacgaagggacttccaaagcgtttgtctcttccagaatcgaagctgtaaaactacaaatcattcttcaaatggagccccagatgcaatccatgactaagatctactgcgaccccctggaccggcctgctagc

SEQ ID NO: 1804 - protein, 54 aa, Homo sapiens
  VARIANT (8): Wherein Xaa may be any one of Cys or Phe or Ser or Tyr
EQGPQVTXGDHEGTSKAFVSSRIEAVKLQIILQMEPQMQSMTKIYCDPLDRPAS

SEQ ID NO: 1805 - DNA, 720 bp, Homo sapiens
tttttttttttttgggttcacatttattgtaacttggaagcccacccttcttcctactcctggagctgtcgtccccaagggctcaggaattagccttgctccacagcaaacagcccagaggccccacctgggcaaaagcaaacaaaacagatacgttcctttccggcaggtgcagatgctctgcccaggcctgcggaagccagctccggtctgtgtgtaaatcctccccaggacttccggcccaccagctccattccagcctccactcggctcagctccgcggcttcctcgagccaggctggtcctgcatcgccatctgctggccgcgcggcacggccggttcctggagccagcaggagtcggaggctgcagggcttgaaggcctcttcaccgtgccctccagggagcagctgccgaagtattcctgctggaacttctggaagtcttcctcggtgaacacggtgccctcagccttcttcttcttggtcttggccacaggccggtcacaggccttgcggccccggttctggcgcaaaatctggcgagggtgcgggaccgagggcccatcatttcaagagcagaggaggcccgcaaaggtcacaggggagttcggcgcagggcagggctggcccagcctcccaccctatgctcagggctgagaccgccatgggtccctaggggaacagcctcggctctcacctcccaggtcccttcctatag

SEQ ID NO: 1806 - protein, 120 aa, Homo sapiens
PCSTANSPEAPPGQKQTKQIRSFPAGADALPRPAEASSGLCVNPPQDFRPTSSIPASTRLSSAASSSQAGPASPSAGRAARPVPGASRSRRLQGLKASSPCPPGSSCRSIPAGTSGSLPR

SEQ ID NO: 1807 - DNA, 734 bp, Homo sapiens
  misc_feature (1)..(311): Wherein any n is one of a or t or c or g
ngcggggctgcccctgcagcgacagccccatcctgcagccaccaatggcatgacccagggccccggcactgcctngtgtgaggggctggcagctttccaactgcagcaagtggaggcccctgccagcttgggcctgtgggcaggggctcagtggggcaggggtgtggctgccccgcccggcacgcctgcacctgtctcctcagtgtgaccagtaccgcaaggggatcatctcgggctccgtctgccaggacctgtgtgagctgcatatggtggagtggaggacctgcctctcggtggccccgggccagcnnaggtgtacagcgggctctggcgggacaaggatgtaaccatcaagtgtggcattgaggagaccctcgactccaaggcccggtcggatgcggccccccggcgggagctggtactgtttgacaagcccacccggggcacctccatcaaggaattccgggagatgaccctcggcttcctcaaggcgaacctgggagacctgccttccctgccggcgctggttggccaggtcctgctcatggctgacttcaacaaggacaaccgggtgtccctggcggaagccaagtccgtgtgggccctgctgcagcgtaacgagttcctgctgctgctgtccctgcaggagaaggagcacgcctccagactgctgggctactgtggggacctctacctcaccgagggcgtgccgcatggcgcctggcacgtggcca

SEQ ID NO: 1808 - protein, 94 aa, Homo sapiens
  VARIANT (77): Wherein Xaa may be any one of Ala or Arg or Gln or Glu or Gly or Ile or Leu or Lys or Pro or Ser or Thr or Val
GAGSFPTAASGGPCQLGPVGRGSVGQGCGCPARHACTCLLSVTSTARGSSRAPSARTCVSCIWWSGGPASRWPRASXGVQRALAGQGCNHQVWH

SEQ ID NO: 1809 - DNA, 529 bp, Homo sapiens
tttttttgaggatttggacatctttaatggatatcaggggagagtgggtcatttttctgccttccacactgtattaccttgaaatgacagaagcttaacatacttaaggtttatttctctctcaccccaaacttattaaggttcacgtgttttctccttggtgcctcatgtccacgtcgtgactcaggaacctgggttcttttcatcatggggccatcatgtcaggactctccatttccaggaatattttagattctctgcctttcagcctcactccctcctccatgacacctggggatgcagcagccatctggagaccatgaaaatgaaagccacttggtgataatattttagagtctgcgtgaaagtcttacattcagagaaacgccacagttctggcaccaggaatgaaggcgccatctggcccctcttgggctccttggcttgaattcctggggtcattgttacactcagcattctcgttttccttgtcagccagggttccaagcactgcagagatgaagcacct

SEQ ID NO: 1810 - protein, 68 aa, Homo sapiens
MLSVTMTPGIQAKEPKRGQMAPSFLVPELWRFSECKTFTQTLKYYHQVAFIFMVSRWLLHPQVSWRRE

SEQ ID NO: 1811 - DNA, 447 bp, Homo sapiens
  misc_feature (1): Wherein n is one of a or t or c or g
ncggccagcactgctcacctctcgtccagggacatgacgggcacgccaggcgccgttgccacccgggatggcgaggcccccgagcgctccccgccctgcagtccgagctacgacctcacgggcaaggtgatgcttctgggagacacaggcgtcggcaaaacatgtttcctgatccaattcaaagacggggccttcctgtccggaaccttcatagccaccgtcggcatagacttcaggaacaaggtggtgactgtggatggcgtgagagtgaagctgcagatctgggacaccgctgggcaggaacggttccgaagcgtcacccatgcttattacagagatgctcaggccttgcttctgctgtatgacatcaccaacaaatcttctttcgacaacatcagggcctggctcactgagattcatgagtatgcccagagggacgtggtgatc

SEQ ID NO: 1812 - protein, 106 aa, Homo sapiens
MLLGDTGVGKTCFLIQFKDGAFLSGTFIATVGIDFRNKVVTVDGVRVKLQIWDTAGQERFRSVTHAYYRDAQALLLLYDITNKSSFDNIRAWLTEIHEYAQRDVVI

SEQ ID NO: 1813 - DNA, 302 bp, Homo sapiens
ggtaccaggttttcaaagaggcattaagtgtagccagaggagggtggccaggaagctgcaggggcaaccagaacagagagaaccagaaaatctctgaggtcccttccatctccagaattccatgattttcaggcagattgaggtatgcatccgaagggtaacatctcaaaactgcagactttggatgttcttggcatctcggggaggaccaggaagggtggtgtgtggtcagctgctgattttccttgaagaatcaaagttggcattcttggtgtccacagccctgattagttagctgatca

SEQ ID NO: 1814 - protein, 57 aa, Homo sapiens
MIFRQIEVCIRRVTSQNCRLWMFLASRGGPGRVVCGQLLIFLEESKLAFLVSTALIS

SEQ ID NO: 1815 - DNA, 354 bp, Homo sapiens
ggtaccaaaggatattttaaaactgtgtctactaactcctgtcttgagctgaaccgcaggccaggtcttccttcactgccactgaagcttaaaggctcccagataacatggaacagtggctctcactgatcagctaactaatcagggctgtggacaccaagaatgccaactttgattcttcaaggaaaatcagcagctgaccacacaccacccttcctggtcctccccgagatgccaagaacatccaaagtctgcagttttgaggaaactgaagctgatctgacaccacttcctttttctccagatgttacccttcggatgcatacctcaatctgcctgaaaatcatggaattc

SEQ ID NO: 1816 - protein, 64 aa, Homo sapiens
MPTLILQGKSAADHTPPFLVLPEMPRTSKVCSFEETEADLTPLPFSPDVTLRMHTSICLKIMEF

SEQ ID NO: 1817 - DNA, 393 bp, Homo sapiens
  misc_feature (328)..(376): Wherein n is one of a or t or c or g
tgatcatttgtgtattgtatttctcaggctctgggagacttttgtctctgtgttttgccatgcatggcctggaaaagaaatagttatgaagttttcactttttgcagctgtcatgggcccaagttgcggtggctcacatggacagtatgggttccaggaaccctgtcaggacagctttctcctcccacccctccacttcccatagattccaaatgggaggtgccagcttcttacagaaactccctggccttagtgactggtggagggataggcacgtggcccagtccaggccagaattccgccctaggcttcacatcctggctctggnagctccacanggtgtgctggcctcacgagccctgcacatggaatctgnctgggtacgggaaatgg

SEQ ID NO: 1818 - protein, 110 aa, Homo sapiens
  VARIANT (89): Wherein Xaa may be any one of Gln or Glu or Lys
  VARIANT (92): Wherein Xaa may be any one of Arg or Lys or Met or Thr
  VARIANT (105): Wherein Xaa may be any one of Ala or Pro or Ser or Thr
MAWKRNSYEVFTFCSCHGPKLRWLTWTVWVPGTLSGQLSPPTPPLPIDSKWEVPASYRNSLALVTGGGIGTWPSPGQNSALGFTSWLWXLHXVCWPHEPCTWNLXGYGKW

SEQ ID NO: 1819 - DNA, 410 bp, Homo sapiens
  misc_feature (1)..(410): Wherein any n is one of a or t or c or g
nggaccatgacatagtgttgcacctcagtactctgcaccttggaaaaccttattttcaagtaaactgtatataagtgcttctcataaaaaacaaatctatgtaaagtcaagtcctaaccctttccagttgaaaagcaaattgcttcctctagaatgttctggatattgtaggctaaagatgtattattttcagcagatcacactgctgaatctgtgcccaggtaaatcttgagttatttttattccatggtgttgttgcggaccaactaaataaccagtggaaaaacaaatttgttttcttcgaaaagcacttgtgttctattgtcaggtagaggaaatgatgtgtattacatgacctcattttctttgcagcttatgtgagtatattaaaagcgaggtgagtggtttgn

SEQ ID NO: 1820 - protein, 62 aa, Homo sapiens
MRSCNTHHFLYLTIEHKCFSKKTNLFFHWLFSWSATTPWNKNNSRFTWAQIQQCDLLKIIHL

SEQ ID NO: 1821 - DNA, 453 bp, Homo sapiens
  misc_feature (279)..(341): Wherein any n is one of a or t or c or g
ggtaccagaatctccaggcgttccaaggacagtccacaattccttgcccagctaacaataaccccatggcttgtctgtttcagaactttcaggtgagaatgcaggaagatgcagctctcctaaacaaaagaataagcactcagcctgggctcacagcacttcctgagaatccaaacactacacttccaccttttcaagatacaccttgtgagttgcaaccgaggattgacccatctcttggtcaacaggtgaaggatggcctcgttgtgggtggcccangtgatgcttccgtagatgccatttacaaagcagttgtcgatgcagccagcaaaggaatgcangttgtcatcatcactgcagtcaacagtacaactcagatcagccccattccagctctgagtgccatgagtgccttcactgcctcaattggtgacccattaaatctctccagtc

SEQ ID NO: 1822 - protein, 129 aa, Homo sapiens
  VARIANT (72): Wherein Xaa may be any one of Arg or Cys or Gly or Ser
  VARIANT (92): Wherein Xaa may be any one of Gln or His
MACLFQNFQVRMQEDAALLNKRISTQPGLTALPENPNTTLPPFQDTPCELQPRIDPSLGQQVKDGLVVGGPXDASVDAIYKAVVDAASKGMXVVIITAVNSTTQISPIPALSAMSAFTASIGDPLNLSS

SEQ ID NO: 1823 - DNA, 532 bp, Homo sapiens
cctaggtgcactctctgcaggactttcccaatcacgggactcagagaagttaaataacctacatgattagcaagccgcagaggctggcatcctaaatccggagtccctgctttgcagccatgatgctccgctgcctccctgtgcagacaactgcaaacaaggcacagactcacagagatcatcagcattcatgagaacaactcaggcttgatcttctctccacctggagcaaaaagcagatttgagagctagatttggagataccgctgtctgaagtgtctcaactttgacatctgccagatgtgtttcttatctggtcttcacagcaagtcccatcagaagtctcatcctgtcattgagcactgcattcagatgtcagcaatgcagaatacaaaacttctcttcaggaccctcagaaacaaccttcttcaggggcgctgtaggaagaaagaagcagcgagaaggcagcagctgctggaccaggtgaatccaaagggtgtgcctcaccatgcgcaggccagagacatgatca

SEQ ID NO: 1824 - protein, 93 aa, Homo sapiens
IWRYRCLKCLNFDICQMCFLSGLHSKSHQKSHPVIEHCIQMSAMQNTKLLFRTLRNNLLQGRCRKKEAARRQQLLDQVNPKGVPHHAQARDMI

SEQ ID NO: 1825 - DNA, 658 bp, Homo sapiens
  misc_feature (1)..(2): Wherein any n is one of a or t or c or g
nntgtacacctcgtctcagataccaaatacttgtgactacacagccgtgggcaccagctctcagccctgctgctcccggagacgacatatttctccactttctaacagctaagatgaggttgtctcttgcagatcccaactttcgtgggagagagtcgtgctctgtgccctgtggaaagtgccacccgcagctgtttccaaggggtgttgagcccagcaatcaaagaagaaaaattcctgtcttgggtccaatctgagcctcccatcctcctgtggctcccgacctgccaccggttatcagctgctgaaagggtcactcaccctgctcggtgcactctctgcaggactttcccaatcacgggactcagataccgctgtctgaagtgtctcaactttgacatctgccagatgtgtttcttatctggtcttcacagcaagtcccatcagaagtctcatcctgtcattgagcactgcattcagcagatgtcagcaatgcagaatacaaaacttctcttcaggaccctcagaaacaaccttcttcaggggcgctgtaggaagaaagaagcagcgagaaggcagcagctgctggaccaggtgaatccaaagggtgtgcctcaccatgcgcaggcaggtgagtgctgcgaggattggctgatca

SEQ ID NO: 1826 - protein, 180 aa, Homo sapiens
GCLLQIPTFVGESRALCPVESATRSCFQGVLSPAIKEEKFLSWVQSEPPILLWLPTCHRLSAAERVTHPARCTLCRTFPITGLRYRCLKCLNFDICQMCFLSGLHSKSHQKSHPVIEHCIQQMSAMQNTKLLFRTLRNNLLQGRCRKKEAARRQQLLDQVNPKGVPHHAQAGECCEDWLI

SEQ ID NO: 1827 - DNA, 312 bp, Homo sapiens
tccggaacgcctttcccatgtttggtgtgttttctacctaatgagttttgatggaagtgaaggctgttatttacttctggaagctaaaaataccagctccctggtcatctcagagttggtttccgatgcaactaaaaacatcaactgatatgaggtccaaaagatggaattttaagcaccaaagacgctcccttatgggcaaagtctcaataggacatctgcatgttcagttgagattctgctttcccctcagatgacagaattattggcaaccagttaaattgacgcaattggaaacccagaaactgatca

SEQ ID NO: 1828 - protein, 68 aa, Homo sapiens
MEVKAVIYFWKLKIPAPWSSQSWFPMQLKTSTDMRSKRWNFKHQRRSLMGKVSIGHLHVQLRFCFPLR

SEQ ID NO: 1829 - DNA, 293 bp, Homo sapiens
agatctcttgagacctatttactgtcatgagaacagcacgagaaaacccgcccccatgattcaattacctccccccaggtccttcccacaacacatggagattatgggagctgtaattcaagatgagacttgggtgaggacacagccaaccatatcacttcttcgtcacaaatatctgcaaccctttcgttttgttagagaaagactcaatgccatattgcagatttttgcatttctccgtcagttggagcgacttctcattcagatatgtgctgttagtggcgcgcggtacc

SEQ ID NO: 1830 - protein, 79 aa, Homo sapiens
MIQLPPPRSFPQHMEIMGAVIQDETWVRTQPTISLLRHKYLQPFRFVRERLNAILQIFAFLRQLERLLIQICAVSGARY

SEQ ID NO: 1831 - DNA, 418 bp, Homo sapiens
  misc_feature (299)..(394): Wherein any n is one of a or t or c or g
aagctttcaccttctccatgattgtgaggcttcccagccaccctgcggaactgtgagtccattaaatctccttttctttataaattaccgaatctcaggtatgtctttatcagcagtgtgaaaatagactaatacggcccataatttggggaatcaatttgggaatctgccatttgctgaatatgtgaattccacctctgcattttagaattgggaaaataatcctagggttcaggtatccaccagacccactatgagttgcactcaggccagaacctccacttatttcctgacctctntaggccctactgtgactggtgcaccacagtgacattttgggtttctangaacagtgctagtgtgcagcagtcctcccanagtctacttatttccnctccccacaggtacaatcacactg

SEQ ID NO: 1832 - protein, 74 aa, Homo sapiens
  VARIANT (11): Wherein Xaa may be Tyr
MSLWCTSHSRAXRGQEISGGSGLSATHSGSGGYLNPRIIFPILKCRGGIHIFSKWQIPKLIPQIMGRISLFSHC

SEQ ID NO: 1833 - DNA, 374 bp, Homo sapiens
ggatcccgctaagcctcggtttcctcgtcggcaccgcagtccaggtcggaacattgggcaggactgaatgaaaattatgtccaggtgcctgcacacaagaggtctccaggcctcctgaatccatcaaaagttatccaagacggctgctgctgctgctgctgcctctaaaccctgaagtacagaaggcaagtgggtcaagatcccaggcccagacagtggcggcccggtggcatcgagtgggtgccgtgtatcttgcaggcacagaacctcccggggaagatggagggattattgccctgcgatcccgcttcgcacgcaagccaggaagtgtgtgtctgaactcccatctgtgagcgtgtcgtcgaggtgtgcac

SEQ ID NO: 1834 - protein, 50 aa, Homo sapiens
MGVQTHTSWLACEAGSQGNNPSIFPGRFCACKIHGTHSMPPGRHCLGLGS

SEQ ID NO: 1835 - DNA, 266 bp, Homo sapiens
  misc_feature (72)..(257): Wherein any n is one of a or t or c or g
ggatccacttgccaggtggcacactcgcgtcctcactcgtgctgcaggttggcagagatggctgatgcctgngctccggtaggattatgaggcagctggactcctctcnctccctgcacattctcatgtccccaccgctccatgtggcctctctgtatggtttctccatgttagctggactccaggagtgtagctagacttcttaatgttggttaagggttctgcccagcccagcttctaagcgggacttctctcangctctcgag

SEQ ID NO: 1836 - protein, 56 aa, Homo sapiens
  VARIANT (21): Wherein Xaa may be any one of Arg or Gly
  VARIANT (33): Wherein Xaa may be any one of Arg or His or Leu or Pro
MEKPYREATWSGGDMRMCREXEESSCLIILPEXRHQPSLPTCSTSEDASVPPGKWI

SEQ ID NO: 1837 - DNA, 369 bp, Homo sapiens
acgcgtattcgtcattcaataagtatttattgaacgtctttcggcgccagtaccgtacagctgggtacaaagtagacagggcctccgttcttgcagagctgtctgtcattctatttcacgcgctcttagttcagccggcgctttcagaaacatcatattgttggattctcgcaagcatactacggttagggccggaattattatcttcataacatagatgagaaaaacagtgcagaaaagcttttgcagctcgagtcagagtccacagaaagtaatgggctcgagcttcaagcacctttggtcgaagggccgccgcggtccaccccgcaccccggccctgggcgctcaaaacgcagccggtgcagctgg

SEQ ID NO: 1838 - protein, 50 aa, Homo sapiens
MRKTVQKSFCSSSQSPQKVMGSSFKHLWSKGRRGPPRTPALGAQNAAGAA

SEQ ID NO: 1839 - DNA, 498 bp, Homo sapiens
ctcgagtatgtgtgtaagctgcaggaaatccaagaaagaaagaagtttgagtttgtggaacctatgctgtcattttttcaggggatgtttaccttctatcatcagggccatgaacttgccaaagacttcaatcactacaaaatggaactacagatcaacattcagaatacacggaatcgatttgaaggaacaaggtcagaagtggaagagctcatgaacaaaatcagacagaatcccaaggaccacaaacgagcaagtcagtttacagccgaaggctacctgtatgtccaggaaaaaaggcctgctccgtttggttccagttgggtcaaacactattgcatgtatcgaaaagcagcaaagaagttcaacatgatcccatttgagcacagatctggagggaaacttggggacggagaggtgttctttttgaaagaatgtaccaagaggcatactgactccattgacagaaggttttgttttgacatagaagctgctgat

SEQ ID NO: 1840 - protein, 166 aa, Homo sapiens
LEYVCKLQEIQERKKFEFVEPMLSFFQGMFTFYHQGHELAKDFNHYKMELQINIQNTRNRFEGTRSEVEELMNKIRQNPKDHKRASQFTAEGYLYVQEKRPAPFGSSWVKHYCMYRKAAKKFNMIPFEHRSGGKLGDGEVFFLKECTKRHTDSIDRRFCFDIEAAD

SEQ ID NO: 1841 - DNA, 393 bp, Homo sapiens
gtcgaccagagttccctccatccccagtttctctcagccctctgcatcccctcaacccccaccttccctccactgctgcctgggtccgccatctgccggcccttccatcctgtggtcaggcacctgccctcacctggctcaccccagggcccacaattgcacagagtaaaaaggagaaaggaaggaatctccagtagaagcttctctgccctggggctggccaccttccaaaccttaaacctactgatacggtttggctgtgtctccacccaaatctcatctcgaattgtacctcccgtaaattcctacacattgggggagggagccagtgggagttattaattgaatcatgctggactgttctcgtagtagtgaagaagtctcatgagatct

SEQ ID NO: 1842 - protein, 65 aa, Homo sapiens
MCRNLREVQFEMRFGWRHSQTVSVGLRFGRWPAPGQRSFYWRFLPFSFLLCAIVGPGVSQVRAGA

SEQ ID NO: 1843 - DNA, 350 bp, Homo sapiens
  misc_feature (1)..(229): Wherein any n is one of a or t or c or g
nntcatgaattatatgaaagctgtttacatggattaaacagtaaatctgacaaacaggctgctttttgatgactctagacatatttcttcttacattttagacatttgagaaaaaaagtcaaatttcttaatactttatgttcaattgagtttgaagccataaagaggaaggaaataataaggattagagcaaaaataaatgaaatagagaatagaaaaacaatagaantcaatgaaacaaaaaattagttctttgaagagatcaacaaagttgacaaagctttaactagaataaggaaaaagaaatactcactactaaaatcagaaatgaaaaacactactactgattt

SEQ ID NO: 1844 - protein, 56 aa, Homo sapiens
  VARIANT (51): Wherein Xaa may be any one of Ile or Leu or Phe or Val
TYFFLHFRHLRKKVKFLNTLCSIEFEAIKRKEIIRIRAKINEIENRKTIEXNETKN

SEQ ID NO: 1845 - DNA, 348 bp, Homo sapiens
  misc_feature (322): Wherein n is one of a or t or c or g
agatctaacggatgaaagaagaaccagagaaactccattatgaagtaaaggtagagctgtgttaaatttgcttaaccacatacttatcattctttttgctctgtgcataataattactggtgcttgccttcttttctgtaaagtaacgcaagtggataccaataacaaaattttcctctcagcataaaacattggtaactttctctatcaatttaatgactgattaatattaaaagcttaagcctaaatcactttgaaatgcagtataaaatgcaatatataatagcaatttatggcaaaaaatcaagttaccacatgcatncttatttatattacaaagtaaggaat

SEQ ID NO: 1846 - protein, 64 aa, Homo sapiens
MFYAERKILLLVSTCVTLQKRRQAPVIIMHRAKRMISMWLSKFNTALPLLHNGVSLVLLSSVRS

SEQ ID NO: 1847 - DNA, 404 bp, Homo sapiens
  misc_feature (335)..(343): Wherein any n is one of a or t or c or g
tgatcagttggggcaggagatgaacaattcataatggtggaacgtcgtaaggctggtcaatcagtcaaggcaggagcttcttttgttgcacttcttttgtgtttttttggctgctccagacttcttggctcctgcaggccatcttcccttgatcctccagcaagccgggcatcctcattcctccgcatttatgcacctgatcctttgaccaaagtgctcttccctctagaccgcctccttcgcctcctttctaggttctggtatgttgggctctgtcatctttctacctgattcaggaaccactgtgacattttttggtaacttccagtctgtangttggatntaggagttcaggattccaatcctacattccaggttccagctgcgtggcccgagtagcccgc

SEQ ID NO: 1848 - protein, 85 aa, Homo sapiens
MVERRKAGQSVKAGASFVALLLCFFGCSRLLGSCRPSSLDPPASRASSFLRIYAPDPLTKVLFPLDRLLRLLSRFWYVGLCHLST

SEQ ID NO: 1849 - DNA, 421 bp, Homo sapiens
ctcgagttccagtactgagaaaagtccccttctgtggccccacgatcccctggactagtccctggccgctttgacgaccttagaggggcctctgctgtcctgggcctcctccctttgctactctccacttccatctcctcccccaaactcatgtttaggagctgtccaatcccagtacctgagcccagctgcagaggggagaactaggcgggagagatggaaggggctgtgaggcacaggcccatcagcagagctccacactcctcacagacacacgtaagttattgagagcagaggtagagacagacacaaaagccacatagaggatgcatgagtgaaggttgcagcatctgcttggtgatatgcctgggatgcagtggggcagttcctgctgcctccagagagctgctttattgcacat

SEQ ID NO: 1850 - protein, 58 aa, Homo sapiens
MCNKAALWRQQELPHCIPGISPSRCCNLHSCILYVAFVSVSTSALNNLRVSVRSVELC

SEQ ID NO: 1851 - DNA, 360 bp, Homo sapiens
tctagacaaggcctggtctactggccctttcatctgtggatgttgctgggtaatggctgagttcaccagcatgctctgaccaaagccactcaccattccaaccccctgcccagaggcaggttgcctcggtccctgggcttggttatgtgtgatgctcatgccactttggtttggatgctgcaacatttgggtcatgcctgtgctcatattgtacattcctggttggctggtaggcgtggtgctataaggggccagtcccatctccgactgcgcagctgcggtggccatcgtcccaggggttctggaggggtcctattcccatcatccctgcgttctgtgccatcagccgtgacgttcgca

SEQ ID NO: 1852 - protein, 96 aa, Homo sapiens
MATAAAQSEMGLAPYSTTPTSQPGMYNMSTGMTQMLQHPNQSGMSITHNQAQGPRQPASGQGVGMVSGFGQSMLVNSAITQQHPQMKGPVDQALSR

SEQ ID NO: 1853 - DNA, 400 bp, Homo sapiens
gtcgaccaattaaatattaaatataaagaaactttaaaaattaatcattaaaacacaactcaataggaagaaaggcaaaagacatgaagagggattgccaagaaaaagaaacaagaattcccataataaaacatgttcaacttactaataatcaaaaatttacaaaatgaaaccacaatgaggtaacattttatactccccagcttggcaaaaatgcaactctgacaatctcaaacattggcaaagatttagagtcctgcaaattctagtatactggtggggagcataaattagtactctggaaagcaatttggccttatctattaaaactgatgatgtgcttttattgtataaaccagcaattctattcaaggtatacatccattcttcagtatgtaca

SEQ ID NO: 1854 - protein, 73 aa, Homo sapiens
MYTLNRIAGLYNKSTSSVLIDKAKLLSRVLIYAPHQYTRICRTLNLCQCLRLSELHFCQAGEYKMLPHCGFIL

SEQ ID NO: 1855 - DNA, 317 bp, Homo sapiens
  misc_feature (1)..(317): Wherein n is one of a or t or c or g
ncggcagctgcttttcatcgtgtggatggtgcaggtgccacctgcagccctccctctgccccgtgggtacgccgatcactgccgcagccagcctggatctcttggcagggccatgccagctgtgggacagcctccatgtgccacgtagggccctcaggcacgcagcagctgctctgggcagtgtgggatggtcaggacgtgggacatctgcttcctgcctccctgcagccagattggtgtccccacggcctcctcctggttgaggggatggcaaacagcaaacaagatgcggcgctttgccttatggatcacacagn

SEQ ID NO: 1856 - protein, 60 aa, Homo sapiens
MCHVGPSGTQQLLWAVWDGQDVGHLLPASLQPDWCPHGLLLVEGMANSKQDAALCLMDHT

SEQ ID NO: 1857 - DNA, 281 bp, Homo sapiens
  misc_feature (1)..(281): Wherein any n is one of a or t or c or g
naccagacaaaaatgggagcttttctgcagagagatgggctggcgcttggcaaggcccacgctccgggctgcagcccagcacagcctcactggtctcccagaaagcatatgagatgcctgctcagggcgctcagggttggctgaggacacagcctgactgctctgttccagtcactggtatttatgagcctcctgtgagcccagacccaggtctgcaccacaggggaggcgggaaaggtacaaattctgctctgcccgccagccccctgcactccaggagn

SEQ ID NO: 1858 - protein, 56 aa, Homo sapiens
  VARIANT (56): Wherein Xaa may be any one of Arg or Ser
MPAQGAQGWLRTQPDCSVPVTGIYEPPVSPDPGLHHRGGGKGTNSALPASPLHSRX

SEQ ID NO: 1859 - DNA, 292 bp, Homo sapiens
agatctgccagcgctcttcgctccctcgctctctcttgctcgctcgctccctctctctcctgctggctgcctgttctaggaagccagcgcggagaggggggggatgcacagcacaggggagagagattgcgcatgttggtcagtcgtgttttaaagagtacagtgcggggaggctgagaggggcgcatgcaacgacaacttttggaagggtgagcttggcgaccttctttattaatgactgcggcaaagcgcccccgggccggcgagggggcgcgggcgggcgggggcgcgc

SEQ ID NO: 1860 - protein, 62 aa, Homo sapiens
MRPSQPPRTVLFKTRLTNMRNLSPLCCASPPSPRWLPRTGSQQEREGASEQERARERRALAD

SEQ ID NO: 1861 - DNA, 366 bp, Homo sapiens
gaattcagggaaaagcaaaaactacaacgaaaaaagacagagctcataatggatgctatccataaacaaaagagcttacaattcaagaaaaccatggatgcaaagaagaactatgagcagaaatgccgggacaaagatgaggcagaacaggccgtcagccggagtgccaacctggtgaacccgaagcaacaagagaagctttttgtgaaactggcaacttcaaagaccgcagtagaggactcagacaaagcatacatgctgcacatcggcaccctggataaggtccgagaagagtggcagagtgagcacatcaaggcctgcgaggcatttgaggctcaagaatgtgaacgaataaacttcttccgg

SEQ ID NO: 1862 - protein, 122 aa, Homo sapiens
EFREKQKLQRKKTELIMDAIHKQKSLQFKKTMDAKKNYEQKCRDKDEAEQAVSRSANLVNPKQQEKLFVKLATSKTAVEDSDKAYMLHIGTLDKVREEWQSEHIKACEAFEAQECERINFFR

SEQ ID NO: 1863 - DNA, 324 bp, Homo sapiens
tgatcaatgagggttgaaaactgtataacattttgcctgcatggaaggggtgcaagaatagaaaaggtgagtgaggatattaacctacatgtgcagggaagcaatgaggaataatactgataactgaagtggggcatgaacaggttcacaaatgtgtgaatgttattctttcaagtcataatccaagagagggaaagtaatacattgcttccactgaaataccctcttcattacacttgcagaggaggagcagaagtggtgacattgtcatgggacctgagatctcttggaggagaaatggatatctacatgtagaaagaattc

SEQ ID NO: 1864 - protein, 51 aa, Homo sapiens
MLFFQVIIQERESNTLLPLKYPLHYTCRGGAEVVTLSWDLRSLGGEMDIYM

SEQ ID NO: 1865 - DNA, 431 bp, Homo sapiens
  misc_feature (1)..(160): Wherein any n is one of a or t or c or g
nncactcatcatgatcaagtggcattcatcccaggggtacaggtatgtttcaaaatatatagagcaataaatgtgctacatcaaattagtagaatgaaggacaataatcatnccacagatacagaaagatcatttgaaaaagtcnaacatccttccatgnagaaaactctcaataaattttgtatagaagaaatgttcctcaatacaataaaggtcatatattataaacccataactaacatcatattcatcagggaaaagttgaaagttttttctctaagatctagaacaagacaaggatgccccctctcatcacttctattcaatatagtactggcagtactagccagagaaattaggcaagagaaaaaaataaatggcatcaaaattggaaaggaagtattaataaaattgtcctgggccgggcgcgc

SEQ ID NO: 1866 - protein, 143 aa, Homo sapiens
  VARIANT (1): Wherein Xaa may be any one of Ala or Arg or Asn or Asp or Cys or Gly or His or Ile or Leu or Phe or Pro or Ser or Thr or Tyr or Val
  VARIANT (38): Wherein Xaa may be any one of Ala or Pro or Ser or Thr
  VARIANT (49): Wherein Xaa may be any one of Gln or Glu or Lys
  VARIANT (54): Wherein Xaa may be any one of GLn or Glu or Lys
XTHHDQVAFIPGVQVCFKIYRAINVLHQISRMKDNNHXTDTERSFEKVXHPSMXKTLNKFCIEEMFLNTIKVIYYKPITNIIFIREKLKVFSLRSRTRQGCPLSSLLFNIVLAVLAREIRQEKKINGIKIGKEVLIKLSWAGR

SEQ ID NO: 1867 - DNA, 412 bp, Homo sapiens
  misc_feature (187): Wherein n is one of a or t or c or g
ccagacttggagccagggccgggcactggctgtcactctggaagccactgctctcccacccttcagggtcccacacggcacttcctgggaccttcccttcctgaccccttcccgggcggcaaggcttctgtctcctgccctcccctgctgggcagggtgcagaggagacgggcccaggtgaacggcnaccccacgcatgctggacgccagtcctgcactgactgcagttgtccctcccacactccacccaggagggtggcacccccatccgcctggtttacagacaagctgaggctccggggtgtccctgcttgccttgggccccgtggcgggtgacatcaggctcctcccagctcgggcctccctggtgacgggttcccttgggttggaccagggcccgcctgcaacgcgt

SEQ ID NO: 1868 - protein, 111 aa, Homo sapiens
  VARIANT (63): Wherein Xaa may be any one of Asn or Asp or His or Tyr
PDLEPGPGTGCHSGSHCSPTLQGPTRHFLGPSLPDPFPGGKASVSCPPLLGRVQRRRAQVNGXPTHAGRQSCTDCSCPSHTPPRRVAPPSAWFTDKLRLRGVPACLGPRGG

SEQ ID NO: 1869 - DNA, 1009 bp, Homo sapiens
ttttttctccccggggacggtgggagtggcacggccgccatcagcttcacaggggccttgaaaattccaggcgtgatagagttctcactgtgtctgctgtttgccaagctggtcagctatactttcctcttctggctgcccctgtacatcacgaatgtggatcaccttgatgccaaaaaggcgggggagctctccaccctgtttgacgtgggcggaatctttggtgggatcctggcaggtgtgatctcagaccgactggagaaaagggcctccacctgcggcctgatgctgctgctcgcggcccccacgctctacatcttctccaccatcagcaagatggggcttgaggccaccatcgccatgctgctgctcagcggagccctggtcagtgggccctacacactcatcaccaccgccgtctccgccgacctggggactcataaaagtctgaaaggcaacgcgcacgccctctccaccgtgacggccatcattgacgggacgggctctgtaggagcagccctgggccccctgctggctgggctcctctccccgtccggctggagcaatgtgttttacatgctgatgtttgcagatgcctgtgccttactgttcctgatccgcctcatacacaaggagctgagctgcccagggtcagctacgggggaccaagttccatttaaggaacagtgacaccccaccccagtcccgtggagggggtctgggcccacccttcacaactgcctttcaaggacagttcagacaaagggccctgcatggaaagagtgacctccctttgccttttgcacacgcacctggaaaagacacagaagccaacctgagaacccctggtgctattttaaaggagacatattgctgaacagcagtgagaaaagtctgcaggaactgctgcctgagccaagccagagaaccgaagacccggccggccctgggctcacaggcgtgtgcccatgcagccacccaaatgcacgcgtgacaacaaggccggact

SEQ ID NO: 1870 - protein, 229 aa, Homo sapiens
FFLPGDGGSGTAAISFTGALKIPGVIEFSLCLLFAKLVSYTFLFWLPLYITNVDHLDAKKAGELSTLFDVGGIFGGILAGVISDRLEKRASTCGLMLLLAAPTLYIFSTISKMGLEATIAMLLLSGALVSGPYTLITTAVSADLGTHKSLKGNAHALSTVTAIIDGTGSVGAALGPLLAGLLSPSGWSNVFYMLMFADACALLFLIRLIHKELSCPGSATGDQVPFKEQ

SEQ ID NO: 1871 - DNA, 1006 bp, Homo sapiens
gggcgctcctggcaggcggtcctgacgaggccgacagaggtgccccggccgcccctggagccctgccggccctctgcgaccccagtcgcctggcgcaccggcttttggtgctgttactgatgtgcttccttggctttggcagctatttttgctatgataatcctgctgcccttcagactcaagttaaacgaatggggcacaatcatttttagctgctttgtttgcattggacaggttgtttttgccctgggtggaatatttaatgctttttggctgatggaatttggaagatttgtatttgggattggtggcgagtccttagcagttgcccagaatacatatgctgtgagctggtttaaaggcaaagaattaaacctggtgtttgtacttcaacttagcatggctagaattggaagtacagtaaacatgaacctcatgggatggctgtattctaagattgaagctttgttaggttctgctggtcacacaaccctcgggatcacacttatgattgggggtgtaacgtgtattctttcactaatctgtgccttggctcttgactacttggatcagagagcagagagaatccttcataaagaacaaggaaaaacaggtgaagttattaaattaactgatgtaaaggacttctccttacccctgtggcttatatttatcatctgtgtctgctattatgttgctgtgttcccttttattggacttgggaaagttttctttacagagaaatttggattttcttcccaggcagcaagtgcaattaacagtgttgtatatgtcatatcagctcccatgtccccggtgtttgggctcctggtggataaaacagggaagaacatcatctgggttctttgcgcagtagcagccactcttgtgtcccacatgatgctggcctttacgatgtggaacccttgggattgctatgtgtcttctgggactctcctactcattgcttgcctgtgcattgtggcccatggtggcatttgtagtt

SEQ ID NO: 1872 - protein, 284 aa, Homo sapiens
MIILLPFRLKLNEWGTIIFSCFVCIGQVVFALGGIFNAFWLMEFGRFVFGIGGESLAVAQNTYAVSWFKGKELNLVFVLQLSMARIGSTVNMNLMGWLYSKIEALLGSAGHTTLGITLMIGGVTCILSLICALALDYLDQRAERILHKEQGKTGEVIKLTDVKDFSLPLWLIFIICVCYYVAVFPFIGLGKVFFTEKFGFSSQAASAINSVVYVISAPMSPVFGLLVDKTGKNIIWVLCAVAATLVSHMMLAFTMWNPWDCYVSSGTLLLIACLCIVAHGGICS

SEQ ID NO: 1873 - DNA, 884 bp, Homo sapiens
gcacgtggagagcttcgcccacggcgtgtgcttcagccgcgagccgctggccccgggccaggtcttcctggtcgagatcgaggagaaagagctgggctggtgcggacatctgcgtctcggtctgaccgcgctggaccccgccagtctggcccccgttcccgagttttctctgcccgatctggtcaacctgggccacacctgggtcttcgccatcacgcgccaccacaaccgcgtgccccgggagggccgcccggaggcggaggcagcggcccccagccgacctccaaccctcctcgtggaaccatatctgcgcattgagcagtttcgcattccccgggaccgcctggtgggccgcagccggccagggctctacagccatctcttggaccagctctatgagctgaacgtgctgcctccgaccgcgcgccgtagccgcctgggtgtcctcttttgcccgcgccccgatggcacggccgacatgcacatcatcatcaacggcgaggacatgggcccgagcgcccggggactgccagctgcgcagcccctctacgcggtggtggacgtgtttgcttccacaaagagcgtgcgccttgtccagctcgagtatggcttcttcttcccacagtgccatccctgcagactctgtgccgcctagtgatacaaaggagcatggtgcaccggctggccattgatgggctccacctgcccaaagaacttaaggatttctgcaagtatgagtgaagacccacagtgcaccagagcacagctgcatcctggagccccagacctgtggctggctggtccgaagttggccacattgctgccagccaagaccagaaataaacagccgatgctgacatctttaaaaaaaaaaaaaaaaaaaa

SEQ ID NO: 1874 - protein, 105 aa, Homo sapiens
ARGELRPRRVLQPRAAGPGPGLPGRDRGERAGLVRTSASRSDRAGPRQSGPRSRVFSARSGQPGPHLGLRHHAPPQPRAPGGPPGGGGSGPQPTSNPPRGTISAH

SEQ ID NO: 1875 - DNA, 1952 bp, Homo sapiens
tcggatataccttctcagaagctgcacaggaggaaagcagtgacaaagaaagaagttgtcattctttgcacgaaactggatggcttctacagggagccaggcctctgatatagacgagatttttggattcttcaacgatggcgaacctcccaccaaaaagcccaggaagctgcttccaagcttaaaaactaagaagcctcgagaacttgtgctagtgattggaacaggcattagtgctgcagttgcgccccaagttccagccctcaaatcctggaaggggttaattcaggccttactggatgctgccattgattttgatcttttagaagatgaggagagcaaaaagtttcagaaatgtctccatgaagacaagaacctggtccatgttgcccatgaccttatccagaaactctctcctcgtaccagtaatgttcgatccacatttttcaaggactgtttatatgaagtatttgatgacttggagtcaaagatggaagattctggaaaacagctacttcagtcagttctccacctgatggaaaatggagccctcgtattaactacaaattttgataatctcttggaactgtatgcagcagatcaggggaaacagcttgaatcccttgaccttactgatgagaaaaaggtcctcgagtgggctcaggagaagcgtaagctgagcgtgttgcatattcacggagtctacaccaaccctagtggcattgtccttcatccggctggatatcagaacgtgctcaggaacactgaagtcatgagagaaattcagaaactctacgaaaacaagtcatttcttttcctgggctgtggctggactgtggatgacaccactttccaggcccttttcttggaggctgtcaagcataaatctgacctagaacatttcatgctggttcggagaggagacgtagatgagttcaaaaagcttcgagaaaacatgctggacaaggggattaaagtcatctcctatggagatgactatgccgatcttccagaatatttcaagcgactgacatgtgagatctccacaaggggtacatcagggatggtgagagaaggtcagctaaatggctcatctgcagcacacagtgaaataagaggctgtagtacatgagcgagctagagaaatcaccaccgtttagaccaagctgtaaggccctactacagacagtgtttaacaagtaaacttacaagaacccaacacaattcccagaaagtaacaatagccagaggttgaagggcggggtagaagaggggggaatgttgcagcgtaatccttcataccacctggttcttgatattctgccgcctgttcaagttcaagaataaaagcgacagcaggacccaaatgcagctcccaacccactccccaggctagacatgcttgtgtccacacagcacaccaatgtgatacttccactgaccggctgcagctctgcatgaaggactcggggtctggatgccatggaatcactgtggctcttgttgcagttttgtactctatacttggtttttcaattaagcttaatggcttttttaaaacatgacttgaagctctagttttctagatcttttacagtgtacagtattttacataactaagctgtattaaaagcttgttcatttacttgccaggaccctggctctacttttagagtcattgtaagaaactctaacttgcatcaaggtactaataagcttaattttaataacccaaagtttaaaggttccgatctttctccttggggtggagtgatctcattctcaggacaaccgtttacttacctgattcctcggagcattatcaacttctgctctgttgtcctgaccatacatatgtcctagaactacagttaagtgtgttgtggaattttagttttgaatcctgtataaaagaactccaagacctaaaaggcaatttatttatgaaaaaa

SEQ ID NO: 1876 - protein, 350 aa, Homo sapiens
MASTGSQASDIDEIFGFFNDGEPPTKKPRKLLPSLKTKKPRELVLVIGTGISAAVAPQVPALKSWKGLIQALLDAAIDFDLLEDEESKKFQKCLHEDKNLVHVAHDLIQKLSPRTSNVRSTFFKDCLYEVFDDLESKMEDSGKQLLQSVLHLMENGALVLTTNFDNLLELYAADQGKQLESLDLTDEKKVLEWAQEKRKLSVLHIHGVYTNPSGIVLHPAGYQNVLRNTEVMREIQKLYENKSFLFLGCGWTVDDTTFQALFLEAVKHKSDLEHFMLVRRGDVDEFKKLRENMLDKGIKVISYGDDYADLPEYFKRLTCEISTRGTSGMVREGQLNGSSAAHSEIRGCST

SEQ ID NO: 1877 - DNA, 1204 bp, Homo sapiens
  misc_feature (1)..(1182): Wherein n is one of a or t or c or g
nccgctcgtgccgatatttccagatatctcacagacattaagcctttgcctcccaacataaaagacagactgattaaaataatgagtatgcagggacagataacagattcaaatataagtaagattttacatcctgaagtccaaactctagatctacggagctgcgatatatcagatgctgctctcctgcacctgtctaactgtagaaaactgaagaaattaaatttaaatgcttcaaaagggaaccgagtttctgtaacttcagaaggaataaaagctgtggcttcatcttgttcatacctacacgaagcttctttgaaaagatgctgcaatctcactgacgaaggagtcgttgctcttgcactcaattgccagctgctaaagatcatcgatttaggtggctgcttaagtattactgatgtgtccttacatgcattaggaaaaaactgcccatttttgcagtgtgtcgacttttcagctactcaggtatctgacagtggtgtgattgcacttgttagtggaccttgtgcgaagaaattagaggagattcatatgggacattgtgtaaatctgactgatggggctgtcgaagctgtccttacttactgtcctcaaatacgtatattactcttccatggatgccccttgataacagatcattcccgagaagtgttggagcaattagtaggcccaaacaaactaaagcaagtgacatggactgtttattgatgcttttttgaagatgatcaatgctaggaaagcttatcaaaactactttcccaggaaaccatctatagagatttgcattctacttaatgttaacactatttttaattattttattgtcttaagttataactctcagagaattagctaagtcttggtatatacatggtttgtgctttactcttaaacatctttaaagtgctattattctatatctgttggatgagtcattatttttgaaatgataatcctagcatgaactctgatctatggtgttggattctgtttcttaaataactttaaaattaactgttttcccttgagatttccttctcctatgtaggtatttgagctattgttctaagtttacctgtaagtataaaccttgggagaatctaagtaaacatatttctaaaagcatagttaccttcctattttctggctcttaccttcttnggagtatttaaatgcccatttg

SEQ ID NO: 1878 - protein, 242 aa, Homo sapiens
  VARIANT (1): Wherein Xaa may be any one of Ala or Pro or Ser or Thr
XARADISRYLTDIKPLPPNIKDRLIKIMSMQGQITDSNISKILHPEVQTLDLRSCDISDAALLHLSNCRKLKKLNLNASKGNRVSVTSEGIKAVASSCSYLHEASLKRCCNLTDEGVVALALNCQLLKIIDLGGCLSITDVSLHALGKNCPFLQCVDFSATQVSDSGVIALVSGPCAKKLEEIHMGHCVNLTDGAVEAVLTYCPQIRILLFHGCPLITDHSREVLEQLVGPNKLKQVTWTVY

SEQ ID NO: 1879 - DNA, 1587 bp, Homo sapiens
tttttttttttttttttttttttttttttttttttttttcactctgcaaccattttactttattactttatgggaaaatttagatatgcaaagcaatgcagataccaaaatatgctttccaagtgtttttggctgagtttgtctctttcagcagttctgaccctaagatacatacttatatggaaaaagctatggataaaaataaataaaatacatcttaatcatcaatatatagacaaaattgaatagaaaaaagtaagaacattataaagcatgaaaatttacataaaattattcctgaatgtgagggttgaaagactctagaggcctgaaatctatttgaaagagaaactttcaagaaaaggaaaaaagcattcctctacttagaatagatatgctatgatctgattctgaagcaatgggattgaactgaatgatatatgaggtttcttccatggcccactgatttagatgatagcagtaaaaaatatattagtgaaaatcatttaatactgtaaaagaataaacagatctggacaggaattccgtaaaaatacatgtagacgttagtctaaatacatttttaagatacaatatattttgactaaactgacaggatatcaacagctcattcacttgacagtcatctgttataaagccattattatataactttaaaatatatttacagacttaaaaattaagataatgcttttatgtacatcagataaaagtttaattagagtgtagagtgccacttcacaggaattaagataatcatgttttaaacaaaatattttgccatgaagatatagataaaatgtacaaacatgtcacatgatacagaaaaacaagaatcatgatcttcacatttacaggaatttaaaaaatcttctctgatggaaatgtgttacaactcaaacttctcttcttgaaagtaatccgcaaaattgagatattcttcaagttgaccatatttctccttaatccagccattttcttttgaccgcctgaaaattctttccactgtttctttaacttgttcatcttcaacttcttctgtcattgcaatggtgcaacattcctggtatagtttgaatttaaaatgtttcagtttatgataaattctggtacggctggcacaaattctgccaacagtgaacacctgtttatcatgtgacatgaaattatctatttgcatggtcctggtgttatacaactctcctgataaatgcactgaatatttacagtagcgatgcagtccacaagcctggcaggaacagttttcaggattcttcaaatgaatacttacattagaataattttctactcgctccttatattgctctttccaacgacttctagataccaagctctctagacgaggctgaacaaagcggttatccaaataatgaagagatgttagcatatcttttgcatatgatttttgccttgtgccatcatataatgttcccagaaaagattcatctaaagcgttgatcagaagagccttcacaactctttcaaaatgagtatagtggtcactaaaagaataaagagaattctgttttactaatttcagttgtg

SEQ ID NO: 1880 - protein, 172 aa, Homo sapiens
MLTSLHYLDNRFVQPRLESLVSRSRWKEQYKERVENYSNVSIHLKNPENCSCQACGLHRYCKYSVHLSGELYNTRTMQIDNFMSHDKQVFTVGRICASRTRIYHKLKHFKFKLYQECCTIAMTEEVEDEQVKETVERIFRRSKENGWIKEKYGQLEEYLNFADYFQEEKFEL

SEQ ID NO: 1881 - DNA, 560 bp, Homo sapiens
tttttttttttttttagatttatattcattttatttatattcatctaggcacttattaagataaacacataatttgagtctaatatgctcagtgcaaaaactagtttcatgaaagatgctagaattgtgacataatcagaaccaaagcagggaggggagattttgtatggttctctgctgtccagaataaagtctacattcctgtcattggcccaacaggcctccaacatctggcaccaagccaggaactatcacttctgatactgacttgaattacactcatctgacattccatataatattccattcctgctttccttttcataaggatatgttttcactctccaaatagactgcaggatccttaggagcagggaaaaatatagtgggaaggccgtgaggaagggagcaggattgtaatgccagtggggtcacaaccagcctcacacagagggtgttatttaaagaagtgaggcagcaacacttaaatctagaagctgagttgcccacacaaagggaactgtcaatatatagtccctgaaagatacatacttacagca

SEQ ID NO: 1882 - protein, 61 aa, Homo sapiens [sequence omitted]

SEQ ID NO: 1883 - DNA, 1139 bp, Homo sapiens
caaacaaaacatacattccctttttattggtcataatgtagagcatctttcaagctaaattatattataattattacatgatactcaatcactaagccagtttcagaaaagacaaacttcatatttcaatttattcagtaaggggaggtcaaaaatgaaggcttttttcccttctaccatattcgctaaatttatgtttaaacctgatatatattttataacactatttaagttatggctttttctaaaccagtgctttttaaggtaatagttataaatacaactgttttgagaaaataggaaataaacactttcacttgctggtttctagttcattattccctttgtcattaagatgataatgctagacaaattaatgtttagacataaacagcaaacacaattttaacatttttcataatattgagagatgtttcagtattatataatcaaaaaatctattacaaatacacatgtatacatcttataaaaatacatttaaaaacaaaaatgggacaaatactgggtcattattcctccaaaggtgagctggtattatgaagaggctttgatttctttctctttatcaggatattcttccacctctgaggagaacattaactcttcactaagatccatgcctggcctataagacaaaaatagccaagataatccaaccagaagagccaccacgagattcaccacaatccatggctggagaatctgttcctcaattcctgcttcccagaggctaccattaacagaagaaggtgtgtaaaggtggattctgtcacttgtcatttgctgactcagagatagtataagagcagtaaagtacaagaaagatgctaaagctgtaggatccagggccaaaaaatttcggattgctactgatattttagcaaagtcaatcctgtcaaaagctgaaattgtactcagagccaaaagcaagtacagaagactctggaatggatacgctagggtcttgtattgttgcagaaggtttgagaggttggatagctgatctcctgctagaacatatatcacaacaatattccacacagcacagccagccaagaatccatgagaaaagagaccaatcatcctgaaagcccggtgactgtaagtgccacatctcc

SEQ ID NO: 1884 - protein, 182 aa, Homo sapiens [sequence omitted]

SEQ ID NO: 1885 - DNA, 849 bp, Homo sapiens
gctagctggctggctggctaaaatacatacctgagctctactggagctatgcaaccttgctgtgtatccgttatttgtaaaggctgactgaacaaaattgccttcatcatacaagcactgctgtctgcactacagtaataaagaaacacactgacagatacaatggcttcaagtgataagcaatcatcaggaatttgtagtgaaattgttggttgactggaaatgttctctatatctccagctgctatctgtccttgaagtagccattcattgccttcagctgttagaaaccagcaactggatactccttcagttagctttgatcctgatgggaggtctaatctgagtttgaactgaagagtctggccagcacacgcagtcacgggggaaagcctaatgcttggagcagatttaggtagtttgggtaatgtcttctgtttttctactaggaacgggccatctaccacagcattttcagatctgaagatggggagcacagataccattttagtttctaaatccatcactttaatttgatgattattggtgtctgctacatataataattctccattctctccaatacacaagcctcctggttcattaaaagttgactctgtaaaactggaactggtaacattatttgtgtctccagttcctgctaatgttgtacagttttttgtttttggatccacaactttaatcttgtgattgtaggagtctgcaacataaagtaaattcctttttttgtcccatgttactccaaggggggtggttgaaagcctttgcattgattcctactccatcaacatcaccaaaagcaaataaattcatggggtctctttctaa

SEQ ID NO: 1886 - protein, 257 aa, Homo sapiens
MQRLSTTPLGVTWDKKRNLLYVADSYNHKIKVVDPKTKNCTTLAGTGDTNNVTSSSFTESTFNEPGGLCIGENGELLYVADTNNHQIKVMDLETKMVSVLPIFRSENAVVDGPFLVEKQKTLPKLPKSAPSIRLSPVTACAGQTLQFKLRLDLPSGSKLTEGVSSCWFLTAEGNEWLLQGQIAAGDIENISSQPTISLQIPDDCLSLEAIVSVSVFLYYCSADSSACMMKAILFSQPLQITDTQQGCIAPVELRYVF

SEQ ID NO: 1887 - DNA, 623 bp, Homo sapiens
  misc_feature (115): Wherein n is one of a or t or c or g
cggttggcgatgagggccacgtttggcacgaacaccggcttgggcatgaagcgcagggcagcagcaggcagctccacgaagttgaagtactgagtgttgtggtcctccacggtgnataggtcgagcagggctggctggaagcgccgggagcccaggttgggcagcatgacagaggtgttgccatggaagaagatgaactcctcagcctcgttggagtagcagagccacttgaagcggcagatgcggtctgtgtgcgtgcggcccgtgcacaccatgtgtgtgccgccctccatcaggatctgcagtgccttcgggtagtcgatcctcagtgctggggctggctctgtggcctgtcggctgagggccagctcctcctccagtgtggctgcatgctcacgcagccgcacatgcttccacaggaccgctgccagcaccgacaccaggagggcgttgaacaccgccgagaggtgcatcctaatgccactgtggggccctaatgagatgacggccactgggaagcaccacaggccaggcaggcttcacccatccctatgggcatcctgagaactggtgaaagcctgaagcctggactccgcgggacgaagccacctccgccgacgcgt

SEQ ID NO: 1888 - protein, 157 aa, Homo sapiens
  VARIANT (120): Wherein Xaa may be any one of Cys or Phe or Ser or Tyr
MHLSAVFNALLVSVLAAVLWKHVRLREHAATLEEELALSRQATEPAPALRIDYPKALQILMEGGTHMVCTGRTHTDRICRFKWLCYSNEAEEFIFFHGNTSVMLPNLGSRRFQPALLDLXTVEDHNTQYFNFVELPAAALRFMPKPVFVPNVALIAN

SEQ ID NO: 1889 - DNA, 449 bp, Homo sapiens
  misc_feature (408): Wherein n is one of a or t or c or g
gcggccgccgtgctggacatggtgcggcccaaggcccagctggtgctggctgcctgcgaaagcctgctcaccagccgccagctgcccatcttctgccagctgatcctgagaattgggaacttcctcaactacggcagccacaccggtgacgccgacggcttcaagatcagcacattgctgaagctcacggagaccaagtcccagcagaaccgcgtgacgctgctgcaccacgtgctggaggaagcggaaaagagccaccccgacctcctgcagctgccccgggacctggaacagccctcgcaagcagcagggatcaacctggagatcatccgctcagaggccagctccaacctgaagaagcttctggagaccgagcggaaggtgtctgcctccgtggccgaggtccangagcagtacaccgagcgcctccaggccagcatctcggcctt

SEQ ID NO: 1890 - protein, 149 aa, Homo sapiens
  VARIANT (136): Wherein Xaa may be any one of Gln or His
AAAVLDMVRPKAQLVLAACESLLTSRQLPIFCQLILRIGNFLNYGSHTGDADGFKISTLLKLTETKSQQNRVTLLHHVLEEAEKSHPDLLQLPRDLEQPSQAAGINLEIIRSEASSNLKKLLETERKVSASVAEVXEQYTERLQASISA

SEQ ID NO: 1891 - DNA, 2179 bp, Homo sapiens
  misc_feature (220)..(242): Wherein any n is one of a or t or c or g
cgaacctcgcgccgccgccgcccgcctcagcccaacatggcgatgcacaacaaggcggcgccgccgcagatcccggacacccggcgggagctggcggagctcgtgaagcggaagcaggagctggcggaaacattggcaaatttggagcgacagatctatgcttttgagggaagctacctggaagacactcagatgtatggcaatattattcgtggctggngatcggtatctgaccaaccannaaaaaactccaatagcaaaaatgatcgaaggaaccggaagtttaaggaagctgagcggctcttcagtaaatcctcggttacctcagcagctgcagtaagtgcattggcaggagttcaggaccagctcattgaaaagagggagccaggaagtgggacggaaagtgacacttctccagacttccacaatcaggaaaatgagcccagccaggaggaccctgaggatctggatggatctgtgcagggagtgaaacctcagaaggctgcttcttctacttcctcagggagtcaccacagcagccataaaaagcgaaagaataaaaaccggcacagccccgtctggcatgtttgattatgactttgagattgatctgaagttaaacaaaaaaccacgagctgactattagaagacacattagtgcagaagcttccaggctgtagagccctgcttcccttctctgacctcacaaagataaacatccttcacctgagttcgtggccatccacctctgctctcccagacccagtgcctgtgactttgagtagtttgttctaaatgtggtgacaaacaagtcatttctgtaagacattgggtcttactttatgtgatttttagtaacagaactgcaggaagatcaagacaatgttgtaatcccggcaagttgctaactgtgcgtttctcccttcttagaatgaatgtctcccccaaaactggctggcaccagcttcatctgtgatacccttcaagaaatgttctctggttttgttttatgctgaaagtagaacacaagtcacatttcagatggaggctgtaaatatctggcattttcttatattgttttatgttttcttgtttttctcttgttgtttttatcttattttctttggggtttttttgtaatgcctttgtacagctcatactttcctgctgacatatctgatcatctctttcatgcagttgccaatattcataactgaaaataatctggtttatcataagtaaaatgggaaacttgcctctgttttttgcaaggggaggtaaagagtgtttagtaattacctatcttaaatctttctgagttggtagtagattcatgttcaaggaacaggaaaaatggaaaaacataagtttaaatcagttctttttaaataactttttattcttttgtataaataaaatttcacaggcttcaaattctcatgctttacttttaaacccgagattgtttttttcacttatttattcatatcatgccttatggaaatttctttttctgtattttctctctttgctggtattcacctgattaaatattgctctaaaaatcaccatggcatatggaaagtctcaaaattataccaaaagtgataacttatgtcgttcttaagtggagtgaaaggatagcatcagtgatagccagtgttgcccaccaggtctccctttcttggagggcttgttggggctgaggaatctgctagtaatcgttacctgcctctagtgctgtggtgaacttgcgacagggtctggctgcacattggaatcacctgagaagctttaaaatactcatgcctggatcccatccctagagactggggtacagcctagttattgggaatttctttaaaagagttcctgggattctgataagaagccaggttgagaaccactacattagaagactgaatggtttaatttacatcctatgttatgattggtccaagggataagatttggggtctaacctttcctttcactctagttagtcatagtccttgacttatgcctatatctttgtaagaaatagtatgtttcatttgtgatagtattggtagggctgaatatggatggcatctactgtaaaacaagtctaccttgtcagatgtgcaaaagctttcactcttgttctcaaataaacttttgtgggtttttttaaaaaaaa

SEQ ID NO: 1892 - protein, 196 aa, Homo sapiens
  VARIANT (74): Wherein Xaa may be any one of Arg or Gly or Trp
  VARIANT (81): Wherein Xaa may be any one of Ala or Arg or Gln or Glu or Gly or Ile or Leu or Lys or Pro or Ser or Thr or Val
RTSRRRRPPQPNMAMHNKAAPPQIPDTRRELAELVKRKQELAETLANLERQIYAFEGSYLEDTQMYGNIIRGWXSVSDQPXKNSNSKNDRRNRKFKEAERLFSKSSVTSAAAVSALAGVQDQLIEKREPGSGTESDTSPDFHNQENEPSQEDPEDLDGSVQGVKPQKAASSTSSGSHHSSHKKRKNKNRHSPVWHV

SEQ ID NO: 1893 - DNA, 625 bp, Homo sapiens
  misc_feature (1)..(510): Wherein any n is one of a or t or c or g
ngctagctactcggcgggatctcccggcaggatgggtaaaaagataaagaaggaagtagagcctcctcctaaggatgtggtgaggaaaataaaacaaccctccttgaacttggagctgtggaacctttaactaagctactcacccatgaagacaaaattgtaagaagaaatgctactatgatatttggaatcctggcttctaataatgatgttaaaaaattgttaagggagttagatgtcatgaattctgtcattgcccagctcgctccagaagaagaagtagttatccatgagtttgctagtctttgtctagcaaacatgtctgcagagtacaccagtaaagtgcaaatatttgaacatgggggattagagccactcatcagactactgagtagccctgacccggatgtaaagaagaactctatggaatgcatttacaacttggtgcaggattttnagtgtcgagctaaacttcaagaactaaatgcaatacctcctatcttagatctnttgaagtcagaatatccagtgattcatttgttggctctcaaaaccttaggtgttattgcaaatgataaggagtctcgaacaatgctaaagagacaatcaaggattgggccatctt

SEQ ID NO: 1894 - protein, 184 aa, Homo sapiens
  VARIANT (129): Wherein Xaa may be any one of Gln or Glu or Lys
GCGEENKTTLLELGAVEPLTKLLTHEDKIVRRNATMIFGILASNNDVKKLLRELDVMNSVIAQLAPEEEVVIHEFASLCLANMSAEYTSKVQIFEHGGLEPLIRLLSSPDPDVKKNSMECIYNLVQDFXCRAKLQELNAIPPILDLLKSEYPVIHLLALKTLGVIANDKESRTMLKRQSRIGPS

SEQ ID NO: 1895 - DNA, 709 bp, Homo sapiens
tttttttttttgtttttgtgtgtcatcctcagaccagccatttgcctcttccaaaaagctggggctaagcatgtgggtggttcaagaggggcagcccccaggccccaggctgggccgcggtaccagtggcaggtccccctgggtctcaggagcttagcttctacggagctcaggtgtcatttatggggttgccagagcaagctgttaaagggcgaatttggtaagactgagctcagagacctggtgggagggcaaggactggcgggcacagcaggaggagattagaggagggtccacctgaatctttgcagcaggcacagagcttctggctgcatctcagaagggggcagacgcacaggccagggaacacggggctctaggctgtggctccgagtgtccctggtgactggaaagcctgaggggaggctggaagctgatacaggatgccggtggcttgtgagacagaatgagctctttcttcctgaagagggacagaggggagagaagagagcagacatcacactgctccttccatccctgcccgtggcagacatcactaatcaaacttacggtgcctggcagacatcactcatcaggattgcactgccgtctcccactgagcccagaccaaacctcagatccccagcacagcctccagcagccacccctgatctatcagggtaggacactcttgcaatccagttgccac

SEQ ID NO: 1896 - protein, 90 aa, Homo sapiens
MSATGRDGRSSVMSALFSPLCPSSGRKSSFCLTSHRHPVSASSLPSGFPVTRDTRSHSLEPRVPWPVRLPPSEMQPEALCLLQRFRWTLL

SEQ ID NO: 1897 - DNA, 428 bp, Homo sapiens
  misc_feature (1)..(2): Wherein any n is one of a or t or c or g
nnctcgagcaccatgggcctgaggggttcccggggcgccagacgctgaagatgaccgatgccggagctctcttgagtcatggcttcttcaaagctccgagaacccgtggatgaagtttttgacctggacttggctgtgccagagacggccagactggacagcagtttacacaaggcccgggcccaactgttggccaagggccggagacaccggccatcccgctccaggcttcgggacagtgccagctccgcggaggatggtgaaggctcggatgggcccggaggcaaggtgaccgatggctgcgggagccccctgcaccggctgcgctcgcctttgcactcaggcccggggtccccggccgggggctctttctgcctggatcctccggggttgcggcgactgggacgaggacgagccgccgtcctcgc

SEQ ID NO: 1898 - protein, 116 aa, Homo sapiens
MASSKLREPVDEVFDLDLAVPETARLDSSLHKARAQLLAKGRRHRPSRSRLRDSASSAEDGEGSDGPGGKVTDGCGSPLHRLRSPLHSGPGSPAGGSFCLDPPGLRRLGRGRAAVL

SEQ ID NO: 1899 - DNA, 579 bp, Homo sapiens
tgaaagctttaaaaaactccatgaaaatttgcaaaacttaaaaaaaaaatgtagaagaggactaaacttgataaaatattaaaagaattgaaacccttcctaaaggcagcttctcaagggagcacaagttcacacacagtttacttttggaggaacgtctgaggtcatgaggactagattctagagctacaggtctcagggacagtctcgagggatacagggcccccatcaccacatccccagatttaaccgcagcagctcagcttttatctgtatctgttggagctctctaggaaatgtcaataccaaagcaaacccaaatcacaactagattagattactattcaagagaatgattctctaccgaaactgtgcaaaatggggatatcaagagagttggaaaatgtaagacgtaaagaccataatcaggaaaatacgcatcatatttgttattcactgagagggaggaatttccacttaaatcctatttccagcagctggatagtgctctcagtggagtgctctggattctgattaatagagatttctagtcctcccagcaacttccttctcaattct

SEQ ID NO: 1900 - protein, 55 aa, Homo sapiens
MGALYPSRLSLRPVALESSPHDLRRSSKSKLCVNLCSLEKLPLGRVSILLIFYQV

SEQ ID NO: 1901 - DNA, 493 bp, Homo sapiens
gattttgctacctctaattttaacatatatcaggcacttcagaacatctaaaaagaagagacatttcaaaaaagcttagcattgtcaactatatataaggtagtgaggaataaaatgcacacaaaactatggatagaatatgaaagtgtcttctaaatatgaccagtctagcatagaaccttcttctcttccttctcaggtcttccagctccatgtcatctaacccactgaacaaacgtggatgtatcgcttccagaggccgtcttaacaactccatttccaaaaatcatctccagaagacatgtattttgtacgacttcttttaaacaaatgagaatttacaagatgtgtaactttctaactctattttatcatacgtcggcaacctctttccatctagaagggctagatgtgacaaatgttttctattaaaaggttggggtggagttgagagcagctttttcatattatatacacaggccttccataaacg

SEQ ID NO: 1902 - protein, 62 aa, Homo sapiens
MELLRRPLEAIHPRLFSGLDDMELEDLRRKRRRFYARLVIFRRHFHILSIVLCAFYSSLPYI

SEQ ID NO: 1903 - DNA, 558 bp, Homo sapiens
  misc_feature (1)..(2): Wherein any n is one of a or t or c or g
nnttttttttttgagagaacttgaacatttaatatggtcagcaccttgtaaggtgaaggtgtgttttttacacaaattataaataatgaaaaatatgcatttagaaaaagaagcagcagtccccttggcgggccggctcgaggactctttggttgagtggcaggtgaggccctgggtccagggtctgtcagagcccccctaggtcatctgccaggaaggccagcaggtagcggctgacatgtctgtcgatgatgacaggcgagaaaccgaggacgcgccgggtccctggcaggcccttggggtctggcggatagcagtacaggagcagggccagtcccacagcaaggcccaggccagccaggaagctcatgggtcgcagagcgtggcggctgggcaggcggctgtgcaggggctgggcatggatatacagggctcggtagaactcctggcagtcccgctcaccgctccgctgcaggtggctcaggaggtcacagagccgcacacgcaaggatgccttggggttccggaacttttccgcctccttgttggtaaggatcc

SEQ ID NO: 1904 - protein, 98 aa, Homo sapiens
QARNRGRAGSLAGPWGLADSSTGAGPVPQQGPGQPGSSWVAERGGWAGGCAGAGHGYTGLGRTPGSPAHRSAAGGSGGHRAAHARMPWGSGTFPPPCW

SEQ ID NO: 1905 - DNA, 883 bp, Homo sapiens
  misc_feature (1): Wherein n is one of a or t or c or g
nggcctagccaaaaggggcgggcgagcacggcccgcggcggcgttcgctggagctggtggaccgggcggctgaccgaggggcggacgcgcggcggggcagaccgctggggactgcgggcggcgctgtgtccgtcgccatgacagatcagacctattgtgaccgcctggtgcaggacacgcctttcctgacaggccatgggcgcttgagtgagcagcaggtggacaggatcatcctccagctgaaccgttactacccacagatccttaccaacaaggaggcggaaaaggtgctgaggagttccggaaccccaaggcatccttgcgtgtgcggctctgtgacctcctgagccacctgcagcggagcggtgagcgggactgccaggagttctaccgagccctgtatatccatgcccagcccctgcacagccgcctgcccagccgccacgctctgcagaactcagattgcacagagctagactcgggcagccagagcggcgagctgagtaacaggggacccatgagcttcctggctggcctgggccttgctgtgggactggccctgctcctgtactgctatccgccagaccccaagggcctgccagggacccggcgcgtcctcggtttctcgcctgtcatcatcgacagacatgtcagccgctacctgctggccttcctggcagatgacctaggggggctctgacagaccctggacccagggcctcacctgccactcaaccaaagagtcctcgagccggcccgccaaggggactgctgcttctttttctaaatgcatatttttcattatttataatttgtgtaaaaaacacaccttcaccttacaaggtgctgaccatattaaatgttcaggttctctcaaaaaaaa

SEQ ID NO: 1906 - protein, 66 aa, Homo sapiens
PRGALTDPGPRASPATQPKSPRAGPPRGLLLLFLNAYFSLFIICVKNTPSPYKVLTILNVQVLSKK

SEQ ID NO: 1907 - DNA, 571 bp, Homo sapiens
tgatcattgtggtgtgtgtaatgagagatgaccttcggggcactggttttgtaaaaaaatatatttaatggaaaagctgaatgcctcttcaagagagctgatccttatctagacacgtcaacttcaactatgaaagaaatgcaaggttaaataatcaagcccaacttagaaagctgttccataaagaatttaagaattaaaatacatccgcattgcagagggctgggtagaatgcaaaggactagtttaaactcgggctgtagaaactgcactgaggcaaccttgtcttggagcgtggacgccttcccggggcacgtccgtttcggatgcagccacaaagcaaatggggtagaacttggacgagaaccgcaccccgcctcccattccggacctcgttgaggtggagagcagcgtggggtgggttttctttcttattgcgggcgttcagcggatcgtgtctccgagtccgggcgtccggctgcaagcccgtggctggcggcggctgcgggaggcacggcacgagttaatgcaccgggagcagagccggtgttcccgacgtcctcgagccggc

SEQ ID NO: 1908 - protein, 66 aa, Homo sapiens
MQPQSKWGRTWTRTAPRLPFRTSLRWRAAWGGFSFLLRAFSGSCLRVRASGCKPVAGGGCGRHGTS

SEQ ID NO: 1909 - DNA, 696 bp, Homo sapiens
ttttgtaggcctgtgaccacatgaattcgcagtataaatgggtgagtcctttttgaaaacctaatcttcagtgtgcctgatctgtaaaactagagcctcaggtttgatcctaggtaggcttcccacaacgtggggaaaattagtttgtgagggaaagctgtttctgagcattatggcatagtgattaagatgagggaccctggaaccagcccgtgattttgggcaagttattttaggtccactttggactgcttcatctcttaaatgaagacagcaaccaccttcaggagtgtgaaggtgacaacacttaaaactgtgcctggcacattgtatttgctattgtcttaatgttctggaataatggtttccataacttgggaagaaaactttgagaacaggattggttacatcaagttgtgtagtgaaaagagaaagatctgttatttaaacttgcagtttaaagtcattagaatcattcttttccgtaagctttctttgcaagagatctgcattaaataaagttgctaggaaataactaaaattggggaaataatctaataatagcaagatgttaagcatactattattgtattttgggggggttggtaataacattcacatggatttatcaatacacactgagaagccaagcctctcaagctgtcccatatcctccatttccaaaggcacacatac

SEQ ID NO: 1910 - protein, 56 aa, Homo sapiens
MLLPTPPKYNNSMLNILLLLDYFPNFSYFLATLFNADLLQRKLTEKNDSNDFKLQV

SEQ ID NO: 1911 - DNA, 667 bp, Homo sapiens
tggccactatgactcacccaagaacagccacatccctggacattatgacttgcctccagtacggcatcccccatcacctccacttcgacgccaggaccgttgaggagccaggatggtatggcagaggccagcacacctggctgttgctgctcaaggctggggacagagcctagtgtacccctgccaggagcagggagtggaccggcaggctgtgaacatgaacaacgcttaacagagcaagtgatgggagccttgttcctgggttctaccatgggagacgctgatcagcaggatgcctggctccctttcccaacccactgctcccaaggcctccagggccctgtgtacataaactggtgggttggaagttgctgggtaactctgatttcagacatgcgtgtggggtaccttttctgtgcatgctcagcctgggctctgtgcgtgtgtgtgtttctatgcattctagaagggtaccaggcacaggttctgtcctagggcacttaccatttagtagggagatggaaccaacccaattaactctagcaatagcctcctaacctgggctcctccattgattcagtgaaccttccaatgcatggctcataatttcaaaatacaggctggttagttactccctacctgaaagccttcataggtgcctctttgc

SEQ ID NO: 1912 - protein, 125 aa, Homo sapiens
MAEASTPGCCCSRLGTEPSVPLPGAGSGPAGCEHEQRLTEQVMGALFLGSTMGDADQQDAWLPFPTHCSQGLQGPVYINWWVGSCWVTLISDMRVGYLFCACSAWALCVCVFLCILEGYQAQVLS

SEQ ID NO: 1913 - DNA, 1285 bp, Homo sapiens
  misc_feature (85): Wherein n is one of a or t or c or g
agaagtatttgattgaattctgctacaccatagcccagaaatacctctttgaagggaaacacgaagatgctgtaccagcagcttntgcagtcccttcgcttccgtgtgaagctgtatggcctgagctccgtagagcttgtgcctgcttacctgctgttggccgaggccagccttggtctgggccgaatcgttcaggctgaagaatatctattccaagcccagtggacagtcctcaaatcaactgactgtagtaatgccacccactctttactgcatcggaatctgggacttctctatatagctaagaaaaactatgaagaggcccgttatcatctggccaatgatatttattttgccagttgtgcatttggaacagaggacattaggacttcaggaggctacttccacctggctaatatattctatgaccttaaaaagttggacctggcagacacattgtacaccaaggtctctgagatctggcatgcatatttgaacaatcactatcaagtcctctcacaggctcacatccaacaaatggatttactgggcaaactatttgagaatgacactggcttggatgaagcccaagaagcagaagccattcgcatcctgacttcaatcttgaacattcgagaatctacatctgacaaagccccccaaaaaaccatctttgttctgaagatcctggtcatgctttactacctgatgatgaattcttcaaaggcacaggaatatggcatgagggccctcagtctagccaaagaacaacagcttgatgtccatgagcaaagcaccattcaagagttattaagtctcatttcaactgaagaccatcccattacttagtgacccatgagctctgcatcaagggttattccaggggctactgaagatctaatatattccagccttgcacaactgctttgaggtactgtagactgctgaagtttccaccctcttcccctgggattgcacacatagctgttatttttttcttacacagcatattaagggaatataaagctttaggcatagaaatcactaaaaactgtgtttgtcatgacctttgtacttgatttatcatgactttgtatgactgagtaatatgtagtcagatcactaatatggtatttgtaattaaactacaaatagtttgtcatttcccagaagtcttccaacgatgcatgtttcatacacttttgctaaaggaggggtaaaggagggggtagggaataaagctatattggaacaaaaaaaaaaaaaaaaaaaaaaaaaaaattta

SEQ ID NO: 1914 - protein, 271 aa, Homo sapiens
  VARIANT (18): Wherein Xaa may be any one of Leu or Met or Val
PRNTSLKGNTKMLYQQLXQSLRFRVKLYGLSSVELVPAYLLLAEASLGLGRIVQAEEYLFQAQWTVLKSTDCSNATHSLLHRNLGLLYIAKKNYEEARYHLANDIYFASCAFGTEDIRTSGGYFHLANIFYDLKKLDLADTLYTKVSEIWHAYLNNHYQVLSQAHIQQMDLLGKLFENDTGLDEAQEAEAIRILTSILNIRESTSDKAPQKTIFVLKILVMLYYLMMNSSKAQEYGMRALSLAKEQQLDVHEQSTIQELLSLISTEDHPIT

SEQ ID NO: 1915 - DNA, 875 bp, Homo sapiens
  misc_feature (1): Wherein n is one of a or t or c or g
nggatccactgccttgacaatggctggctgtacatctcaccgcgcctcaccttcccctcactccaggccctggtggaccattactctgagctggcggatgacatctgctgcctactcaaggagccctgtgtcctgcagagggctggcccgctccctggcaaggatatacccctacctgtgactgtgcagaggacaccactcaactggaaagagctggacagctccctcctgttttctgaagctgccacaggggaggagtctcttctcagtgagggtctccgggagtccctcagcttctacatcagcctgaatgacgaggctgtctctttggatgatgcctaggcccaaaggagaggccaaaagggaaaccaaggctgcacacctagaaccccaattcagcctcctgggcaccccagaggcaaggctgtgcactcagggagggagggtgggacacagaggtgcatctagggtcccacctgtacccttgctctttcctctcttagcccttagaagtcacctacttccttccagtgccatgatcccacctgcgacctctagtgcgagtgcagagaaggtgggaccagggccagggttccaaaaagagaataagcctcctggggggtctgacctagttagttcttgagtttggggtttccagtaccatctggatgccctgcctgttgagccccattctacatccccaccattaaccaggccccacccacaaggtagaaacaacccctagagtcaacgagaaagtcattttcagaaaatctacaagtctcgttgagaccaccaccatacctcagaaggtaggactgtggcctagaagggaaaggaaagctgagatgatgtcttaccgtagcagctgatca

SEQ ID NO: 1916 - protein, 113 aa, Homo sapiens
  VARIANT (1): Wherein Xaa may be any one of Arg or Gly or Trp
XIHCLDNGWLYISPRLTFPSLQALVDHYSELADDICCLLKEPCVLQRAGPLPGKDIPLPVTVQRTPLNWKELDSSLLFSEAATGEESLLSEGLRESLSFYISLNDEAVSLDDA

SEQ ID NO: 1917 - DNA, 696 bp, Homo sapiens
ctcccctcggtcacccatgatcctgaactttgtgcctagaattcctttgttttttcagagtggaaggtgcggggagtgattttatggtacatatatgtatggcagaacaataagtgagttttctttgcaagataattatcttgccatgtgtgatcgttagacctgtgttttcactccgcattctcggactgaggttggcccatgcggtctgggcggctgcggcttattcacacctactattgagcacagagtccactgagtgaactgaccggctcttctcccctctctgtgcagagaacatgtaggttgtgtttggtatgagcagtgctgcagtggatgttcctgtacaggttttccagtacgtgtgcgggagtggaaaagctggatctaggatgaggatgtgtgaatgcccaaattacatgagaactaagtcattttctaagaggcgatagcagtctgcgctccctccagcagtgatgaagacatgcagtgaatccagtctctctagaactaggttttgccgggtttgcagatcctacaggcagaacgggtgggatgcacacccctgggatctgggtttgcatctcctgggcactgatgtgactgcgcctctcctcatgggcatccaccaaaggtgtttgcttctgtgaaatgcctgatcacgccttttgactttatgttgggttatttgtactc

SEQ ID NO: 1918 - protein, 57 aa, Homo sapiens
MKTCSESSLSRTRFCRVCRSYRQNGWDAHPWDLGLHLLGTDVTAPLLMGIHQRCLLL

SEQ ID NO: 1919 - DNA, 653 bp, Homo sapiens
ccatgcagccgcgtactttgtgtcccaggtagctcgtctcttagccatgtacgcctctgcattccggtcactgggagcggggccgtgggggctgcacatgcgcactgcgagtcctcgcctactcccagaaaccacccgggcgcatacgcggtgcggccgctgcttcaggtcggcgggctccagggagacctgggtgggcagcgtcgccgtttctcctttcttgggcagtatttttcccagcgccacgcggaggctgggccattatgagctctgcatttccaggacctggtcactattcaggacacggttccagcgcagtgcgcgttagccatgtctcagggatgagtggcattccaagatgtggccattgacttctccaaggaagagtggggattcctgaaccctgctcagagagatttgtacacaactgtgatgctggagaattatcagaacctggtctggctgggactttccatttctaaatctgtgatttcactgttggagaaaaggaaactgccttggataggcaaaagaagagataagaggcccattgccagatgtgccaggtgcagagattaaggagttatctgcaaagagggctattaatgaagtattatcgtagtttgacacagtgataaaatgtacaagaaacg

SEQ ID NO: 1920 - protein, 77 aa, Homo sapiens
VAFQDVAIDFSKEEWGFLNPAQRDLYTTVMLENYQNLVWLGLSISKSVISLLEKRKLPWIGKRRDKRPIARCARCRD

SEQ ID NO: 1921 - DNA, 537 bp, Homo sapiens
ttctctatcccttcccctgatccatctcgtctctgttctccttcccttttccgttcccgaagccggaagagccgaggtacccacggaaaaagtcgaagctgtccccggagagtgaggccttcacgaagcggtggcggaaggagccgaagttctctgatcggaggcgtgagcaagtggcatctccggaaagagccgaaacacggactcgagcttaatcccaggaggggcccgagggcgagatccggaaatctccggaaagagccgaaggccgggacggttaggattgtcggaagtggccgattgcttggacagggccggcggagaagatcggagcaagtccgtggaagaagccaaagactgggacggattgaattgttggaagaacccgaactcgcagaggggactgggcgcagtggcacacgaggacacacggaaacctccgaacgttgaggagataatctcggaaaagttacggaaacctgggaagtcggcgaaaccctacgttcgggtgttttcggaagcagccgaagcggccgc

SEQ ID NO: 1922 - protein, 149 aa, Homo sapiens
FSIPSPDPSRLCSPSLFRSRSRKSRGTHGKSRSCPRRVRPSRSGGGRSRSSLIGGVSKWHLRKEPKHGLELNPRRGPRARSGNLRKEPKAGTVRIVGSGRLLGQGRRRRSEQVRGRSQRLGRIELLEEPELAEGTGRSGTRGHTETSER

SEQ ID NO: 1923 - DNA, 817 bp, Homo sapiens
ctaaagtttaaaaattactaacagtctgcatctgccacccaagcatgtgattttacaagtcagaaaagtgtagcgcagaaatgttaagtgacctgccctaggtcacccaggttgctaagggcagaatcagcacagaaacccaggcccagtgaccactgcccccaggcaagacctccttcccttccactgcactttggcaggtgttctaggggaatccaactccttgccttagaggagacctgttcaatgatatcagatagactggagatgttacgttttggtgtggccaatcacaacaccaggatgagcttaggaggctggtgatatttgtctatctaagcacccccaacctatctatctgtctgctgtttgtctatctttctcaggttatgcatagtgatcaaaccccgcctggtaactgtagggaaagagcatgactggtgtgttacagctacatacgccccctggtggtatttccagttgtttgtcctcttcatgcaaatgttgccaccttgtgccagctctctcacctagcttccttcatgacgacagtggttgcaattctgctcctctctctgccttcccctgtccttggctccccatgtccagaatctgatcatttactggtgtgcaccctgggatgtgatgtgtgctttgggaggagacaggacccaacagtatctcagctgtgctctggtaatcagtgtgcaccacattacaagcatcctcatcccagtatcctccctattgaaaaagaaatgggaaaggggtggatgtgtcaataaacacaacattgaaggcatctgaaatagaaaaa

SEQ ID NO: 1924 - protein, 80 aa, Homo sapiens
MTTVVAILLLSLPSPVLGSPCPESDHLLVCTLGCDVCFGRRQDPTVSQLCSGNQCAPHYKHPHPSILPIEKEMGKGWMCQ

SEQ ID NO: 1925 - DNA, 734 bp, Homo sapiens
aaatttctgctgagtgaaaacaaaatgcaagtgggtaacaaaatgaaaaaaaaaacacaactaagatcaagacaggtactggctatagttaaaaggaaagaacactttagtcttcagccttataattataaatattctaagaaactcaagagtaagacacaaggtgatctgaaaacatttttggtcatctaaacaggacctgaagcaatgaaagaagatgatgttctcagctaagcatcctatatatattttgtttctgaaagaataaaactatctgtgtgtgttcttaagattacaaatggaataaaagggtccaaaggttttattcacatggttcatgttttcaaagagaatagaaccataattaaacataatccagtatattttcaccagttaagcagactgtcttccaggaatctggtttgatcaaagtttttttcttcatcttctggtgatttctgaagggacgccagtaagatggttgctgcctccggaatagttagtagttggggatttgggcttcgtctttccggcagtggccggtcggagaggtcctttctccggctttggtcggagatgaagcggcgaccctgtgcaaaaacgagacctggggctcagcgacagcctggcccgggacaacccgcgcttaaacctcagctcctcccggcacagcgcagtccccgggcgtggggagggggcaggttgctccaggatagggtcgcgcggggctgccg

SEQ ID NO: 1926 - protein, 85 aa, Homo sapiens
MVAASGIVSSWGFGLRLSGSGRSERSFLRLWSEMKRRPCAKTRPGAQRQPGPGQPALKPQLLPAQRSPRAWGGGRLLQDRVARGC

SEQ ID NO: 1927 - DNA, 1360 bp, Homo sapiens
atgagcgcgccctggaggcgagccaggcccgtcaccacctcccagcggccccgcccctccccgcaggtccctcccctctccgcaggccccgccgccgccgccatctttgttgggggcagccaggcctggctcgagatgccgaagtcgtgcgcggcccggcagtgctgcaaccgctacagcagccgcaggaagcagctcaccttccaccggtttccgttcagccgcccggagctgctgaaggaatgggtgctgaacatcggccggggcaacttcaagcccaagcagcacacggtcatctgctccgagcacttccggccagagtgcttcagcgcctttggaaaccgcaagaacctaaagcacaatgccgtgcccacggtgttcgcctttcaggaccccacacagcaggtgagggagaacacagaccctgccagtgagagaggaaatgccagctcttctcagaaagaaaaggtcctccctgaggcgggggccggagaggacagtcctgggagaaacatggacactgcacttgaagagcttcagttgcccccaaatgccgaaggccacgtaaaacaggtctcgccacggaggccgcaagcaacagaggctgttggccggccgactggccctgcaggcctgagaaggacccccaacaagcagccatctgatcacagctatgcccttttggacttagattccctgaagaaaaaactcttcctcactctgaaggaaaatgaaaagctccggaagcgcttgcaggcccagaggctggtgatgcgaaggatgtccagccgcctccgtgcttgcaaagggcaccagggactccaggccagacttgggccagagcagcagagctgagccccacaggctccggacgcagaggtggcagtggcaccagggccggcagagctttggagctctggctgtggacatttttgtctgctgtggacactgagaaagttggccatgaggcctgcttggccggggatcgagacagtagccaagctccccggcgagagccccaatgccgtctgggggacgtttagaggcgtggcactaggagtgcacatctgtgagcatgacaagcttatcctcccatggtaacagaagtccaggctgaggctgattctggacgctgtcctttcagcacacgcagagcaaagatcgttggaagccccagtgtgggagatgctcctcagggaggaagccatgtgagggggctggctctgtggcgggtgagtggtcccctcctccatcagcctggacagccgctcggggttctaaggagtgactcctgtcccggcctggtgtgagtgggcagtgtaataaagtgtctttctatacggaaaaaaaaaaaaaaaaa

SEQ ID NO: 1928 - protein, 284 aa, Homo sapiens
MSAPWRRARPVTTSQRPRPSPQVPPLSAGPAAAAIFVGGSQAWLEMPKSCAARQCCNRYSSRRKQLTFHRFPFSRPELLKEWVLNIGRGNFKPKQHTVICSEHFRPECFSAFGNRKNLKHNAVPTVFAFQDPTQQVRENTDPASERGNASSSQKEKVLPEAGAGEDSPGRNMDTALEELQLPPNAEGHVKQVSPRRPQATEAVGRPTGPAGLRRTPNKQPSDHSYALLDLDSLKKKLFLTLKENEKLRKRLQAQRLVMRRMSSRLRACKGHQGLQARLGPEQQS

SEQ ID NO: 1929 - DNA, 676 bp, Homo sapiens
  misc_feature (1)..(2): Wherein any n is one of a or t or c or g
nntgatcagtaagcactggcggatggataaccctgggagttgttcagcatggacatggaggccgtctccgggtgagtgcacaccccacccgcccactgtgagcagagaggcctcatgacgacccaaggctgctaccaacagaaccagagggggactccgggcacccatcgtcagccttgcttactccgtgaattgtcgaacttcacactgtaccagtttgcgttaagcgtctccatggcgcgttctggacacacagctgactcctccggccccacacaccagtacatgctggggggtctttgcgacatgccagccatcaacccttgcagcagccgatcttcaaaggcaggtcccgctgttgtcactgccactgccgctggctgtggggtgcattaaggcgtggactcgtagccatggctgagcagaaagctttcttgctctgaggcgacggcggggccgggtgcgggcgctccgggacgcggggccgggcggacacactggcggggccggggcctggccgtcccaccgccgtctgccccccgcgccggggccgggcccagacgcacttcctcaatcctgaggcgggcgggcggggagggcggcgcgaagagcgcgcagagcaaggccgccgccagctctcccaggaaccgtcacgaggcgtcccctcggcggccgc

SEQ ID NO: 1930 - protein, 88 aa, Homo sapiens
PWLSRKLSCSEATAGPGAGAPGRGAGRTHWRGRGLAVPPPSAPRAGAGPRRTSSILRRAGGEGGAKSAQSKAAASSPRNRHEASPRRP

SEQ ID NO: 1931 - DNA, 846 bp, Homo sapiens
ttccttgttttaagtattcttaatccttttgcaaaaacacatttctatattaataaacatgaaaaaaagaacagaatggaaaatacacatagatttcatttaagataaaaaaatacaacttcagtgaaattgcaactgccccccaggaggccttcagtgtatgtgttctcttgtggtcattagggcaacgaaggaaaagatctgagaagccctgacatccttggccaatttaattttcacaggaattctatgacatagatgctgttacgtgagaaaatgtaggtccagcaagggcataccaaggccaaggttacatggctaatacacagctgactcagaactcaacccaggatctgtgtgcaaagtccatgttcttcatgcaacagcctgagcagctgatcaatgaggtgtgctaggaaacaaagctgaaaaggtaggttggtgataaatcatggaaggtcttgaaggccaggcttaaataaaggcagcatgtgagagaaagttcttggctcactagggcgagacctggagaagccgaaggtaagaacatgaagtgcagtacagccacaagacaggtagtgactcattcatcccagcttctttggggccacctcttatctatgagacaaagtgtgacttgcactcaacagtggcattgtttctgtggcaaaagaaggaaatgtgcctctgcttctgttcgttttctacttaatgttgttttgcagaacacagagaacgcagaatcatggaccatcccattttttagctgaatgctagagaaagcacgtcagccatctgcaacttctcccaaggtgcccttcccatgattaggatacattccataat

SEQ ID NO: 1932 - protein, 73 aa, Homo sapiens
MKCSTATRQVVTHSSQLLWGHLLSMRQSVTCTQQWHCFCGKRRKCASASVRFLLNVVLQNTENAESWTIPFFS

SEQ ID NO: 1933 - DNA, 712 bp, Homo sapiens
cttaaactgaagcaagttcggtggacgccggtgccctgatctaaagaaacgactcagggactgcggcgcttgcacgtcaacgggaggtgtgagcccaaagaaatgggacgtcggtcatcagatactgaagaagaaagcagaagcaagagaaaaaagaaacaccgtagacggtcctcctcgagcagttcttcagatagtagaacatacagccgaaagaaaggaggaaggaaatcaagatcaaagtcaagatcttggtccagagatcttcagcctcgttcacattcttatgatagaagacgcaggcatcgatcaagcagtagctcttcttatggctccagaaggaaacgaagtcgaagtcgttcaaggggtcgagggaaatcctatagagttcagaggtctaggtcaaaaagcagaacaagaaggtccaggtcaagacctcgtctccgttctcatagtcgtagcagtgaaaggtccagtcacagaagaacgcgtagtcggtctcgggatagagaacgacgtaagggcagagataaagagaaaagagaaaaggagaaggataaagggaaggacaaggaattacataacatcaaacgtggggaatctggaaacatcaaagctggattagaacatctgccaccagctgaacagccaaagccagactacagctggttcttgaagctgctgcaaaagctgatgaagcattgaaagccaa

SEQ ID NO: 1934 - protein, 200 aa, Homo sapiens
MGRRSSDTEEESRSKRKKKHRRRSSSSSSSDSRTYSRKKGGRKSRSKSRSWSRDLQPRSHSYDRRRRHRSSSSSSYGSRRKRSRSRSRGRGKSYRVQRSRSKSRTRRSRSRPRLRSHSRSSERSSHRRTRSRSRDRERRKGRDKEKREKEKDKGKDKELHNIKRGESGNIKAGLEHLPPAEQPKPDYSWFLKLLQKLMKH

SEQ ID NO: 1935 - DNA, 768 bp, Homo sapiens
  misc_feature (1)..(673): Wherein any n is one of a or t or c or g
nnaaaaataaaaggtttctgttggtcaagatttaaaaaaaaaaaaagtttcttcctgcagccaatcacaagtccatccctttaagccaattataaacgcaccactggtgtctcccttgatgccagccccactgagtagctgtgaggtggggtggggcagggcagggttgggtaggggaagggggaggtggggcaaggggggctgctgccactcagccggcccaggagccacacagatctcttggccctcaacagcatccagggtgttccaagggctttgcagctactgcctccggtcttccgtctccgacctggaaaacgccatcaccacgtcctctgcaccctggtcgatggagtgcggaggcagctggctgagctggctgttgaccacccctgcataggtgcgcaggaactcctcctcgctggctgtcaggtttgatcccatcttccgcagcatgagcagcactcggaccttctgctgaatgtacatctcctccggactcttcccgggagctccctcgcggttcatccccctgcctggctctggggactcctgcttctggaaattaacttcaggcaaacaggtgctcaactgtgaggggagggctgtggctgggcagaagtaggaaggtgccgccctgggccgcccgacccggccgggccggcaggggcangcgggtccggcgcgcagcgcgcggcggcctgttccggggcgtgctcagcccgagcagccgctgcggcggcggcagtagcagcagcaggagcggcc

SEQ ID NO: 1936 - protein, 57 aa, Homo sapiens
  VARIANT (26): Wherein Xaa may be any one of Arg or Cys or Gly or Ser
GEGCGWAEVGRCRPGPPDPAGPAGAXGSGAQRAAACSGACSARAAAAAAAVAAAGAA

SEQ ID NO: 1937 - DNA, 476 bp, Homo sapiens
ggaaagacaactaaagtttgaaatacaatcctacagacactttttgagtgcctactatgctagtcactgcactaggtgctggggaatggaatgttcaagacgttctccataacctcatagcagcgggctccagcggccatgaggagtacgaggagtattttccttgacttctaggagtatgatgagtattttccttgacttctctccacttcctaggaacaaagcacctatttattaatatttcagaaataggaaaatgctcatgaaagaagagagacaccatcctcactggattaaactgatgactgttccaggaaggagtcttgagacattgctggactgatatgtgaacactgcttgttctctccaaatccacttgcaaagtggacgcacctggtccctgctaaagcctttttctttcctggcttctccaatgccacgagaacaaaagatctctcacttcagtgtcctgacgc

SEQ ID NO: 1938 - protein, 62 aa, Homo sapiens
MVSLFFHEHFPISEILINRCFVPRKWREVKENTHHTPRSQGKYSSYSSWPLEPAAMRLWRTS

SEQ ID NO: 1939 - DNA, 521 bp, Homo sapiens
gagacagggccttgctctgttatccaggctgaagtgcagtggtgtaatcaaggctcactggagcctcaactgcctgggttcaagaaatcctcccacctcaggctcctgagtagctgggaccacaggagtgcaccaccacacacagctgatttttaaattttttgtagagatggagtcttgctatgttgtccgggctagtcttcagctcccaggctcaagccatcctcctgcctgggtctcccaaagttctgggattataggtgtgagctaccacgctgggtcatgaaccatttctacaaagcagctcatgctatggaccaagtcctgtgtaaacaggtaactcgcctacacttaattcctgcagtagcccagggaatgactccatgttccagcagagaaactgagccttggagagggaaggtgccatgtgaaggtcacacagtccattcacaggggcagaaagacaacctccccacagctgggcagttccaaccaccacggccagggctctaaccacgcgt

SEQ ID NO: 1940 - protein, 104 aa, Homo sapiens
SSAPRLKPSSCLGLPKFWDYRCELPRWVMNHFYKAAHAMDQVLCKQVTRLHLIPAVAQGMTPCSSRETEPWRGKVPCEGHTVHSQGQKDNLPTAGQFQPPRPGL

SEQ ID NO: 1941 - DNA, 427 bp, Homo sapiens
tgatcaggtggggccttggtgggcggctgcctttcctatacagtttgtcttgtcaccctggtttcccactggggccaggtctcttctccagcctccacctgcctgtctgatccaagagctgagacacggccacccagcaccagtcactcctctgttcaccttaagtaacacacaaatcgggaacaggaggacagaaccgttggcattatcaggattcgtgttttgtgggggtgggagtggagagtagggtggtcttgtgagttgtgcagggtgaagaccgcttccctgagacaggggcagtggtgctgatggaatgtgggggaggcccacatttgagcaaagctgccctgcccttgtcccctggcctggcttcctggtaaggagtttcagccgcctccgcaggaacccccaaagtgcagattccgga

SEQ ID NO: 1942 - protein, 58 aa, Homo sapiens
MWASPTFHQHHCPCLREAVFTLHNSQDHPTLHSHPHKTRILIMPTVLSSCSRFVCYLR

SEQ ID NO: 1943 - DNA, 863 bp, Homo sapiens
gaattcacagtgagccagtggctgagctggtagggagggaacacaagccggtgtgttcctcccctggtccagctctgcgcttcctcctgagagccccaaggtgagtagggggaggaagagacctgcccagcctcaggcctccgtgtggctcttcttactccatgcagcacagtgactccatgtagcctccaagggaggcagcttcacaggggcctcaggaggcccagggatgccccgtcagttgggcacctgtgtgaacctgaaacctgcccagctgccttgcccatccttgcccttcctccctcacaacctctctgtctgcaggggccactaaacatagcctcctcctcacagcccttaccccctggggcattccttacttaaagcagaaacaacaaaatgacctgtgatggagccccagctgtgtcaggctgcgtgctgagtgcagagaccccctaccccattaaatcttcccaggcattgttcaccctgttcctattgtacccctaacgaaactgaggctaaggggagtgggctgcccaagatcagacagtcaggggctcaaaactcccatttgcaaattccttttcctattggtgccagccaagttctgaccactgggccctcagctggtcagcacagcaaagagcatcatggacccacttactgactgttacagtgtggggggcaccgtgctgtgccccgcgtgttacccccgggcaagtgcagaggcatactgcctctggataggcaaaggctccctggggcaccagcccctgagacttgatccaggacacaaagtttgccaagcccacagcccaagactggctttccattcaggggcccaagacccctgctctaga

SEQ ID NO: 1944 - protein, 81 aa, Homo sapiens
MESQSWAVGLANFVSWIKSQGLVPQGAFAYPEAVCLCTCPGVTRGAQHGAPHTVTVSKWVHDALCCADQLRAQWSELGWHQ

SEQ ID NO: 1945 - DNA, 545 bp, Homo sapiens
cggccgggcccttgggaccccagctcttcagggagggactccaggcagagcttcattctcaaatgcccagacaagcactaaatatgcgtagtgcacccagcgcacttgccggggagttgtgactgcatctgaggatcccatgcaagaatgggcgtacagatatcaaggccatatacttgtggtgcagaataaaagagaagaaggacggaaagcccccatgagaggcccgggccacagttgtgctctgctgtgggtgagaagagctcctgaaccacagcaaatagcatccctggtgccgagaagaatttcatttcctagaattattcagtctttctttttaacacaggatcacgtgaaaccttaaatattttcatctgagagaccgtatgaataattttgaatgaatgactacgcctttggggtaaattccttctgaaagataaccaggtggtaaattatcaggccgctgggcactagaatgagaagagatggtgctgggtctccaggagtgtccatttggcttccaaagcccccaacacagatct

SEQ ID NO: 1946 - protein, 77 aa, Homo sapiens
MKFFSAPGMLFAVVQELFSPTAEHNCGPGLSWGLSVLLLFYSAPQVYGLDICTPILAWDPQMQSQLPGKCAGCTTHI

SEQ ID NO: 1947 - DNA, 465 bp, Homo sapiens
  misc_feature (1): Wherein n is one of a or t or c or g
ncggccgagcggggctccatgttttcccctggccaggaggaacactgcgcccccaataaggagccagtgaaatacggggagctggtggtgctcgggtacaatggtgctttacccaatggagatagaggacggaggaaaagtagatttgccctctacaagcggcccaaggcaaatggtgtcaaacccagcaccgtccatgtgatatccacgccccaggcatccaaggctatcagctgcaaaggtcaacacagtatatcctacactttgtcaaggaatcagactgtggtggtggagtacacacatgataaggatacggatatgtttcaggtgggcagatcaacagaaagccctatcgacttcgttgtcacagacacgatttctggcagccagaacacggacgaagcccagatcactcatagcaccatatccaggttcgcctgcaggatcgtgtgcgacaggaatgaa

SEQ ID NO: 1948 - protein, 155 aa, Homo sapiens
  VARIANT (1): Wherein Xaa may be any one of Ala or Pro or Ser or Thr
XAERGSMFSPGQEEHCAPNKEPVKYGELVVLGYNGALPNGDRGRRKSRFALYKRPKANGVKPSTVHVISTPQASKAISCKGQHSISYTLSRNQTVVVEYTHDKDTDMFQVGRSTESPIDFVVTDTISGSQNTDEAQITHSTISRFACRIVCDRNE

SEQ ID NO: 1949 - DNA, 425 bp, Homo sapiens
tccggaggagataaaactggtttttccacagcaagagcatttctacctgtggaaggaggcaattgatttgttaaggtcactttattcccaatattctttgcaagcaaagcctgaatgggtttggtccctttctggagagtagacactggtactgaatccaatgaggcaaatgactctggaaatgatggctctgtatgctttgattcactgaaacagtcaatctgcacatcactttctagattctcaactgttgtctcatttgtgcttaactttgccttcttccttggagaaagctcttttgtgctgtcatccacataatcagtttgtttggactgtcgtttaagtgttttaagcagtgtcttcggtaagtcttttgaaggcaattcctttttcaacagcttgcttctagccataggaaaatctat

SEQ ID NO: 1950 - protein, 137 aa, Homo sapiens
MARSKLLKKELPSKDLPKTLLKTLKRQSKQTDYVDDSTKELSPRKKAKLSTNETTVENLESDVQIDCFSESKHTEPSFPESFASLDSVPVSTLQKGTKPIQALLAKNIGNKVTLTNQLPPSTGRNALAVEKPVLSPP

SEQ ID NO: 1951 - DNA, 390 bp, Homo sapiens
tgatcatgggggcagatccccaggaaaggcttagcgccacatcgcctagaatgaaatgggtcagcatctgacatactgcataaatcactgaaccaatattttctaaatgtaacatgcatgatggtacaaaatcacacatagatgaaaatcaactggtctttgaagaactttgattcattagtgagcttgaaaacccaacacaataaacagatagtggaagtggaaggagtatccctaaggatgcatttaaggagaaatgatgtgacagaagatttgaaagcaaaaaagaatctatcaggaagataagaaagcaattattaaacaaaaattaagaagccaatcgccctcccaagtttctaccccttggtaacattactgattcacactagt

SEQ ID NO: 1952 - protein, 54 aa, Homo sapiens
MKINWSLKNFDSLVSLKTQHNKQIVEVEGVSLRMHLRRNDVTEDLKAKKNLSGR

SEQ ID NO: 1953 - DNA, 408 bp, Homo sapiens
tccggagtagggctgcccagtggctgggctcccctccaaccaccctggccaaactccgcatcgttcagctggtcagcctgccagcgtctaccggcttctgctgatgtctgtttgggtgttcttccaccagagtgttcctctcgacgtccagctgcctgcatgtctgtctgctagggtctcggggtttttatacgcacaggatgggggcttgacaggccaggatggtctatgtgtgattttgtaccatcatgcatgttacatttagaaaatattggttcagtgatttatgcagtatgtcagatgctgacccatttcattctaggcgatgtggcgctaagcctttcctggggatctgcccccatgatccagtcaggtcccaccaggctctacctccaatattagggatcc

SEQ ID NO: 1954 - protein, 57 aa, Homo sapiens
MCDFVPSCMLHLENIGSVIYAVCQMLTHFILGDVALSLSWGSAPMIQSGPTRLYLQY

SEQ ID NO: 1955 - DNA, 368 bp, Homo sapiens
agatctgcttcacactctgttcatgtcacctaaaatgtctctttataacctaaacctctcatctgaaatgtctctccaacagtcacctaacacaacccttttttccccacctaaaaatgggacttccatagctagagtagcagctacccaaatacgaacgcctcatcctgtagaaatctacttttaaggaaaccgtatccaattagcttagttttatagagtttgatataattggcaccctgatgtcagcggtatcaccatctggccactgcctaggaagctgacgggcgatgctggcatcgggccttccgtatgtgagttatgtggactccacggtttggattaccaagtgccgtcccaggaattcc

SEQ ID NO: 1956 - protein, 54 aa, Homo sapiens
MSPKMSLYNLNLSSEMSLQQSPNTTLFSPPKNGTSIARVAATQIRTPHPVEIYF

SEQ ID NO: 1957 - DNA, 435 bp, Homo sapiens
  misc_feature (1)..(3): Wherein any n is one of a or t or c or g
nnncagcgctgtattgtcataaatagagccggttttgtggtgttttcactactcggttggatgcctcagccataaaacaccgtgatggacagcgagcgtcaacaaaagcattatggaattacctccccaattagtttggcatctcctaaagaaattgatcatatttacacacagaaattaattgacgccatgaaaccatttggagtgtttgaagatgaggaagaattgaaccacaggctggtggttcttggtaaattgaacaatttagtaaaagaatggatttctgatgtcagcgagagtaagaacctcccaccttctgttgtggctactgttggtggtaaaattttcacatttggatcctataggcttggagtacacaccaaaggagctgacattgatgcactttgtgtagctccaagacatgtggaaagatct

SEQ ID NO: 1958 - protein, 117 aa, Homo sapiens
MDSERQQKHYGITSPISLASPKEIDHIYTQKLIDAMKPFGVFEDEEELNHRLVVLGKLNNLVKEWISDVSESKNLPPSVVATVGGKIFTFGSYRLGVHTKGADIDALCVAPRHVERS

SEQ ID NO: 1959 - DNA, 150 bp, Homo sapiens
ggtacctctttcaaagtatactacacgctcgaagagtctaaagcaagacaaaaggttctatttttccatcccaagtacctgaaagatctggcccttttctggagaactaaaggtgtgactgcataccgcttgtccaccggcttgatgatc

SEQ ID NO: 1960 - protein, 50 aa, Homo sapiens
GTSFKVYYTLEESKARQKVLFFHPKYLKDLALFWRTKGVTAYRLSTGLMI

SEQ ID NO: 1961 - DNA, 338 bp, Homo sapiens
tgatcagtgtgctaccgcagcttagggaactctcccgttttccccatttaggaggacgaaagaggcattgtgttgctggcctttcagaagtctctcctagcagaatcagaagaccctggctgagcagctttgggagaagcaaagtctgaatgagctaaaaagccttttccgtttgccttgcaacaagcaaatgaagtaaccaaagaaaaaatgcgcttgaatgaaaagaacaagattctgtgcgtgccgaatcggatcaaaggcagtgcgcatcacccatcttcgtccaccgtaaactccctgcaacttaagggctggctttatcgtcagactccgga

SEQ ID NO: 1962 - protein, 55 aa, Homo sapiens
MRTAFDPIRHAQNLVLFIQAHFFFGYFICLLQGKRKRLFSSFRLCFSQSCSARVF

SEQ ID NO: 1963 - DNA, 301 bp, Homo sapiens
tccggaggctgagaagtccaagatcaaggtgctgacaaattcactgtctggtctgtgtggcatgtcgtaaaaggaacatggcggccaaggttccaggggagaatccagttgcttgcctttttcagcttctagaagttgcctgcattccttgacttgtgaccccatttcatcttcaaaaacagcaagggccagaccccatttcatcttcaaaaaaagcaagggccatctcagtttgtcccacgtgtaatcattgcctcactcttctgcctccctcttccacattcacagacccttgtgatca

SEQ ID NO: 1964 - protein, 68 aa, Homo sapiens
MKWGLALAVFEDEMGSQVKECRQLLEAEKGKQLDSPLEPWPPCSFYDMPHRPDSEFVSTLILDFSASG

SEQ ID NO: 1965 - DNA, 372 bp, Homo sapiens
gaattccacagggatgcccagtctctgctcccagagactctgattctgtaggtctgggatgggcctgtgaactggaatttgccaagaggccatctctgcaggtggttctgatgccagcatcttctggtcacactgagaatcatggctcggggagagcctgaactttggctgtgaggcatgttggaagctgaacacccgttcttctaagaaagtttaatgccagatctcattttccaagggagtccaaggaattaaacttgctcctgacagttgaccagattacagcattcaacccccctgttactcagcttcaatggttgtcaactcctgggtcccctcctctctcccaggtgattggaagcaggtctcaga

SEQ ID NO: 1966 - protein, 59 aa, Homo sapiens
MPHSQSSGSPRAMILSVTRRCWHQNHLQRWPLGKFQFTGPSQTYRIRVSGSRDWASLWN

SEQ ID NO: 1967 - DNA, 448 bp, Homo sapiens
aagcttccagaactgtgagacaacacctgttgtttcaagccaaacaattgagttatgttgttactgcatttagggaactcatcaagaagtataactgggctgtgggtgttgaggctttcccacccctggaccagacagtggagttaactgggcttccaaatgccctgccttgcttcagccagtttaaagtgggtcatggtgaattgtgaccagtggattcctaatggacacagcctccacaacaagcaagggaacacatctggctgggcaggagtacgaaatgtgcatgtcagtgcagaaaaatctgtacctcaaccactcagtgaacacatcccagacccctccccaggctccctcacagctcaaatagccaaatatttagcccccttttgaagtggctcagtactgctggaaaaagagagatgcaagctacataactactattcag

SEQ ID NO: 1968 - protein, 77 aa, Homo sapiens [sequence omitted]

SEQ ID NO: 1969 - DNA, 411 bp, Homo sapiens
gtgcacagctactaggcttctaggtagtatctactgcacaaatggtgtggtgcagaggacacccttgccttggtatggacaggctgaagtgttgactttagactgagaaaacagcaaatattttgaccatgctaatcagtccccagtgtgggctgttgtgtttcaggttagctgtgagctaacgatggcatgtaggtacattccccttcttttgagctcaaggagaaagaggcaacagggaagagtgagaagagagagacggagggaagggttggtatcccttgttctgtctgatggagggagggctcggctgagaagagagccagctgtgctcatggaagatgctgagggagccagggtccaagcagtgcctctcagaattgggcacaggctggccattctcccctctac

SEQ ID NO: 1970 - protein, 78 aa, Homo sapiens
MASLCPILRGTAWTLAPSASSMSTAGSLLSRALPPSDRTRDTNPSLRLSLLTLPCCLFLLELKRRGMYLHAIVSSQLT

SEQ ID NO: 1971 - DNA, 384 bp, Homo sapiens
  misc_feature (335)..(384): Wherein any n is one of a or t or c or g
tctagaattttccttctagcctatgtctgcaggctgtatgtatacagcctgttgttttgataataaaaagtatggcttacgtgtttttaccccgtggttcttaattttctattatgacacaggtccattttggatgtttgactatgtactatctcccttaaaatgtagccactctgatgtttaaatacgattttatgtgacttcacggccccttgaagatcacggaccctgttgtttaatggctgaacaaagcacagaatgcgtagacaacttccactgaagcaataataaaggttgtatgtataactttcagaccacttaagtgttgcttatcntggttacatcgtcttcgctatcatagcgagtttacttattaccactgtn

SEQ ID NO: 1972 - protein, 53 aa, Homo sapiens
MSAGCMYTACCFDNKKYGLRVFTPWFLIFYYDTGPFWMFDYVLSPLKCSHSDV

SEQ ID NO: 1973 - DNA, 411 bp, Homo sapiens
ccatggttgacccacttccctgacagtgccttgagctcctcccctgatctgggctggtccaggcccttgctgggggacgccacgtgctagggtagaccagaagtcccttcttggaagccctacttcctgtggttcttagatgccatgtggctgacatctggagagagggtggactatggactccctccccacatgaaatctatgaaaggccaaataaggtttaagaggtctgttctcagcccctgacaaccttcaggactctctaagactgcacgaacaaaaatgaagtagtgcatggaccaatgaggtgataagaccccagcggaaaaattttctccaatattcctctaggagagagtcctagcagcaagaacattggtcacgagattgggcacaggatcaatcaactct

SEQ ID NO: 1974 - protein, 52 aa, Homo sapiens
MSATWHLRTTGSRASKKGLLVYPSTWRPPARAWTSPDQGRSSRHCQGSGSTM

SEQ ID NO: 1975 - DNA, 348 bp, Homo sapiens
  misc_feature (1)..(348): Wherein any n is one of a or t or c or g
nngtgcaccgctgcctctcccagctgctgctggcccacgtggccgacgcctggggtgtggagctgccccaccgccaccccgtgggcgagtggatcanagaagaaaaaacctggcccgagagtcgaagggccgccccaggccaacagaaatcacccggccttacctctgtccccacccttaccttcccccacaccgccccctgcttgggttcccaccccagcgcttgccgctgctcccgctcctgtccccacagcctcctcctcccattctccatcaccagggaatgccccggttcccacagggtcccccagatgcctgtntntcctcagaccatactttccagtcggn

SEQ ID NO: 1976 - protein, 116 aa, Homo sapiens
  VARIANT (1): Wherein Xaa may be any one of Ala or Arg or Gln or Glu or Gly or Leu or Lys or Met or Pro or Ser or Thr or Trp or Val
  VARIANT (33): Wherein Xaa may be any one of Gln or Glu or Lys
  VARIANT (107): Wherein Xaa may be any one of Cys or Phe or Ser or Tyr
  VARIANT (108): Wherein Xaa may be any one of Ile or Leu of Phe or Val
XCTAASPSCCWPTWPTPGVWSCPTATPWASGSXKKKPGPRVEGPPQANRNHPALPLSPPLPSPTPPPAWVPTPALAAAPAPVPTASSSHSPSPGNAPVPTGSPRCLXXLRPYFPVG

SEQ ID NO: 1977 - DNA, 418 bp, Homo sapiens
gtcgacaatcctccaggaagtacaggttataacattggaaaactgggaaacaactaatgcaattaatgaggttcagaagatcaaggtaaccagcccatgtgtggaagctaattcatgttcactttaccaatatagattaatctataatatggaaaaaactgtcttcctacctgctgatgcttttgaattcatactgcaatcagccttgaatgacctctggtctataaaaccggacacagttcaagtaataagaacacaaaatccccagagctatgtctacatggtaacattcatatcaactagaggagactttgatctgcttggttatgaagtagttgaaaggaataatgtcacactggatattacagaacaaaaccaaggaaaaccccacttggagacattcacactgaattgggat

SEQ ID NO: 1978 - protein, 90 aa, Homo sapiens
MEKTVFLPADAFEFILQSALNDLWSIKPDTVQVIRTQNPQSYVYMVTFISTRGDFDLLGYEVVERNNVTLDITEQNQGKPHLETFTLNWD

SEQ ID NO: 1979 - DNA, 423 bp, Homo sapiens
  misc_feature (1): Wherein n is one of a or t or c or g
nacagatgtgacctttactctgaaagatcctcatactcctgaccatgatcttggaatcattttgctctcagtcatccttacccctaaagaaagagagtccagggatgtgtttcagaccaaagtttacgcctatcagacctacacagaaaatcgcatctttggagaggaatagtcagcatcaccttgattgaagggagagacctcaaggccatggattccaacgggttgagcgatccctacgtgaagttccggcttgggcatcagaagtacaagagcaagattatgccaaaaacgttgaatcctcagtggagggaacaatttgattttcacctttatgaagaaagaggaggagtcattgatatcactgcatgggacaaagatgctgggaaaagggatgatttcattggcaggtgccaggtcgac

SEQ ID NO: 1980 - protein, 112 aa, Homo sapiens
RKRVQGCVSDQSLRLSDLHRKSHLWRGIVSITLIEGRDLKAMDSNGLSDPYVKFRLGHQKYKSKIMPKTLNPQWREQFDFHLYEERGGVIDITAWDKDAGKRDDFIGRCQVD

SEQ ID NO: 1981 - DNA, 392 bp, Homo sapiens
  misc_feature (1)..(390): Wherein any n is one of a or t or c or g
nagatctgtcatgagatttcagaaccccggcttcaaaactatgatgagaatggcagaatccacagcttgcggatagaccgtgtcacctataaagagaagaagaaataccagcccaaacctgctgtggcccacacagcagagagggaacaggtgattaagctgggcaccaccaattacgatgacttcctgagtttcatccatgcagttcaggaccgtctcatggatctgccagtgttgtcaatggacttgagcacagttggcctcaactaccttgaagaggagattacagtggatgtcagagatgaattctctggcattgtgagcaaaggagacaaccagattctccagcaccatgtcttgacacggatccacatcctgagtttcctgtcntg

SEQ ID NO: 1982 - protein, 130 aa, Homo sapiens
  VARIANT (1): Wherein Xaa may be any one of Gln or Gle or Lys
XICHEISEPRLQNYDENGRIHSLRIDRVTYKEKKKYQPKPAVAHTAEREQVIKLGTTNYDDFLSFIHAVQDRLMDLPVLSMDLSTVGLNYLEEEITVDVRDEFSGIVSKGDNQILQHHVLTRIHILSFLS

SEQ ID NO: 1983 - DNA, 334 bp, Homo sapiens
  misc_feature (334): Wherein n is one of a or t or c or g
ctcgagcaaagaaagaaatcggtgtggtgccagcagaggtgttctcagcaggacctggcccattaaatgaaagacttccatgctgagccaatcaagagagacctggacaaaaatcagactctttcctgccctggaaacccatgccttgaatctgtaattcatctgttaaatcaagtgtgcagccggtggtttagcacagagggggacgacggggaagagagaggggcaggagctgcagcacttgaatttccagcatcagagtccagttagggaaaagaaacagagctgtgatagcttcttggaccttatgtttccagcaaagagaaagcagcan

SEQ ID NO: 1984 - protein, 67 aa, Homo sapiens [sequence omitted]

SEQ ID NO: 1985 - DNA, 431 bp, Homo sapiens
tccggatgcatttggccaacgtcctcaatcaacgtctgcgtggcagtctgcatcccatcaatgacagctgctgggaggcttgcccagacctctcgaatagagtgagcactgtccccagcctggtacgcgccgaatttacacgagggagactgctctgatggtcactgaacgcatgaaggatgttagccaggcctttggctggattccgtgtgtgctgtgaaccatggggacctacagatttgactttggtcttcggactggcatgacttaggctacagactggaaccacaggcattgacagtgatgacacctagagccaggatgcttctggacttctgtcctatcacaaggctgcctctgagggccaatctccctctctgggcctccccactaacacccgtgctccagcacctcttaggattcctaaggag

SEQ ID NO: 1986 - protein, 88 aa, Homo sapiens
MPVVPVCSLSHASPKTKVKSVGPHGSQHTRNPAKGLANILHAFSDHQSSLPRVNSARTRLGTVLTLFERSGQASQQLSLMGCRLPRRR

SEQ ID NO: 1987 - DNA, 289 bp, Homo sapiens
  misc_feature (1..(2): Wherein any n is one of a or t or c or g
nnacgcgtcaccctcaggttcaccatccaggacctcctggcccacgccttcttccgcgaggagcgcggtgtgcacgtggaactagcggaggaggacgacggcgagaagccgggcctcaagctctggctgcgcatggaggacgcgcggcgcggggggcgcccacgggacaaccaggccatcgagttcctgttccagctgggccgggacgcggccgaggaggtggcacaggagatggtgagcggaggacagactgtgctgccactggacgtgtaaaggacattgactcgag

SEQ ID NO: 1988 - protein, 90 aa, Homo sapiens
  VARIANT (1): Wherein Xaa may be any one of Ala or Arg or Gln or Glu or Gly or Ile or Leu or Lys or Pro or Ser or Thr or Val
XRVTLRFTIQDLLAHAFFREERGVHVELAEEDDGEKPGLKLWLRMEDARRGGRPRDNQAIEFLFQLGRDAAEEVAQEMVSGGQTVLPLDV

SEQ ID NO: 1989 - DNA, 336 bp, Homo sapiens
  misc_feature (279): Wherein n is one of a or t or c or g
aagcttacaatcatggtggaaggtgaagcagaagctgtcatatggaatccttggcaagtttcacgcagggccttcctgagtagccaaagggctttagggagaaatcttgacaaatagactcttgctgttaccctttgtatgagttttctacggctgccatagcaaaatgctacagactggatggtttaaacaacagaagaattttctcacaattttggaggctgagagtctgagttcaaggggttggcaggttttgtgtcttctgaggcctctctcctntgctcccaggtggtcgcctttttgctgcgtcctcacatggtcatcctctttgtcgac

SEQ ID NO: 1990 - protein, 56 aa, Homo sapiens
  VARIANT (38): Wherein Xaa may be any one of Cys or Phe or Ser or Tyr
MLQTGWFKQQKNFLTILEAESLSSRGWQVLCLLRPLSXAPRWSPFCCVLTWSSSLS

SEQ ID NO: 1991 - DNA, 461 bp, Homo sapiens
acatgtacagattgtaagactaatgcacaaaaggtatatcagaatttttttaatgttttggcgctactttgtttttaaaaatatttttggctgaacaataccataatttgttatgatctgcataggagatagaaaatgggtagaaagacactatagtaagtaagctgctaaaacagaggatggaactggaggatgtagaaactgagagcatcaagtggactcagggtggtccatttttcaaagtatttggacaagaggacttgttattttcatttgtattctgtccgtatattttggctggagaagcagatgttttaaaaagaaagtgagagtttaaaggaaaaaaggtaacagatgtgctagtcagttgcatatcaatgtacattaacccaagagtgaaggcagataggaactggagaaatggaaagtggcaaaaatgagttctggtgaggctggcaggc

SEQ ID NO: 1992 - protein, 54 aa, Homo sapiens
MYIDMQLTSTSVTFFPLNSHFLFKTSASPAKIYGQNTNENNKSSCPNTLKNGPP

SEQ ID NO: 1993 - DNA, 186 bp, Homo sapiens
  misc_feature (1): Wherein n is one of a or t or c or g
ngctccattcaaggctaactgattgcacaacggctctgagcaggagagagcaaaaggtgaaccacagttgtacagcttgctggtggttggggtcacattggactatcaatatccaggagatgttgagaaaaagaggggatcctttccaacaagtcatccagcaactctgggacagaaggaaagctt

SEQ ID NO: 1994 - protein, 52 aa, Homo sapiens
MTCWKGSPLFLNISWILIVQCDPNHQQAVQLWFTFCSLLLRAVVQSVSLEWS

SEQ ID NO: 1995 - DNA, 637 bp, Homo sapiens
  misc_feature (1)..(631): Wherein any n is one of a or t or c or g1
ngcggccgccggctgaatgaagcctgggacgcgggagccgcgccgcgcgcagtgtctgcagtgccggaggtctgggaggctccgggcgaagcctccctgctgcaggttatgatgatgtcagacaatgctaaaggcagagcagctcattcatggaagaaaagagggagtatttcttctctaagtaatcatgaattttggcgaaaggaaattcatgggcgcatcaaagattctatgagtactgtgtcttatatggaagaacccagtcagcgtgatgatatctctcgccttacagttcagatggaaaacacctatcagttgggtcctcccaaacattttcctgtggtcaccgtcaatcatattttgaaagatgtagtaaccagctatctacaagtagaagaatatgaaccagagctctgtagacagatgactaaaaccatttctgaggttattaaagcccaggtctaggacttgatgattccacggtataaactaattgtgattgttcacattggacaactgaacaggcagagcatacttattggaagcagatgcctctgggatcctaaacgtgataccttttcatcttatgttttcaggaaattcttctctccttcggctccttgcaaaatgncctatg

SEQ ID NO: 1996 - protein, 154 aa, Homo sapiens
  VARIANT (1): Wherein Xaa may be any one of Arg or Cys or Gly or Ser
XGRRLNEAWDAGAAPRAVSAVPEVWEAPGEASLLQVMMMSDNAKGRAAHSWKKRGSISSLSNHEFWRKEIHGRIKDSMSTVSYMEEPSQRDDISRLTVQMENTYQLGPPKHFPVVTVNHILKDVVTSYLQVEEYEPELCRQMTKTISEVIKAQV

SEQ ID NO: 1997 - DNA, 431 bp, Homo sapiens
  misc_feature (1)..(215): Wherein any n is one of a or t or c or g
nntcgcgagaatgggctacgagcgctggtgaggacgtggagaaactgggccctcatccacgacctgtgggaacgggacggtgcagcctccgtggaaaacagcaggtccccacggagctccacacagtcgcctcaggacccagcagttncactcctacgtgtacacccaaaggcctcgaaagcaggggcgtgaacaaatacttgcacacaaattnnccccagcatgctactcactgcagccaaagggtagaaacagcccaactgtctacagatggaagaagggataaacccaccatggcccacccaacccgtggaatagtattcagccatgaaaaggagtcaggctccgacccaggccacagtgccgatgcaccttggggacgtcacgcccagtgagagacgccagacacagaaggccacgtgcagtgtgtg

SEQ ID NO: 1998 - protein, 63 aa, Homo sapiens
  VARIANT (1): Wherein Xaa may be any one of Ala or Arg or Asn or Asp or Cys or Gly or His or Ile or Leu or Phe or Pro or Ser or Thr or Tyr or Val
  VARIANT (50): Wherein Xaa may be any one of Ala or Pro or Ser or Thr
XRENGLRALVRTWRNWALIHDLWERDGAASVENSRSPRSSTQSPQDPAVXLLRVHPKASKAGA

SEQ ID NO: 1999 - DNA, 484 bp, Homo sapiens
  misc_feature (1)..(474): Wherein any n is one of a or t or c or g
ntttttttttatgatcaagttggatttattcctgggatgcaataatattttaatatgtggaaatcaataaatgccatactccttatttacacaacaaaaagattaaaaatcatgacttttnttatgcatgcctaaaattattttgacaaaatttaaaatccattccaaataaaatctatanacaaattaggtatagaaagaatatacctcaaaataaagagatatgttctttataagctataggacaatcccatggttaacattattgtcaatggtgaaattttggaattatttttaagatttattataagaaaaagatgcccactctcactacttcttntcaacaccgtattggaaatcctgctcaganatctaagacaagagaaaaaagagcatttaaataagaaacaacaagttcttctattcatggagattaacgctcaggtttttgcagattagattttacagcatganatctggtacc

SEQ ID NO: 2000 - protein, 71 aa, Homo sapiens
  VARIANT (33): Wherein Xaa may be any one of Ile of Leu or Phe or Val
  VARIANT (43): Wherein Xaa may be any one of Asn or Asp or His or Tyr
DNPMVNIIVNGEILELFLRFIIRKRCPLSLLLXNTVLEILLRXLRQEKKEHLNKKQQVLLFMEINAQVFAD

SEQ ID NO: 2001 - DNA, 890 bp, Homo sapiens
ctcgagcgcttttttaacttctgcggcctggacccggaggaggcgagagggttgggtgtggcccacctggcacgggccagctcggatatcgtgtccctggcagggcccagtgctgggccgggcagctctgaagggggctgctcccgccgcagctcggtgactgttgaggagcgggcccgggagcgcgttccctatggcgtgtcggtggtggagcgcaatgcccgcgtgatcaagtggttgtatgggctaaggcaggctcgggagagcccagcagctgaaggctaggcgccactgggcctggaattcgccacaggacggatcttacagaggcaagtggtccctggacctctcttgcatccattctctagacggccgtgtcagaggctccaccctgttgtgaacttggtatggaggcaaaggcttagaggctggaccagcattgttgggcaaggactgactctccaagggttttgttcttggctttggacacctgagaaccccctcctcccctcccccaatacaaggtttttgacatgagtgtactcctgcttagttcctcttgtggggctgcatttgcggtgctttgccctccccactgtgagtgaggggccaagggatctcctcaatcctgtctccccagcggctctgtttcctccttctttccttggcctctgtcctttgctgacttcctcttccttacccagcagaactcaccctggggtcggggcagtggggaggggcctatccactgctcttcctagtccttggcagctggcctaggtgggcagactataggagggactggttaggagtctgcattgctttgacttccctctccttggttaataaacacaaatgcttgtttctcaaggaaaaaaaaaaaaaaaaaa

SEQ ID NO: 2002 - protein, 94 aa, Homo sapiens
LERFFNFCGLDPEEARGLGVAHLARASSDIVSLAGPSAGPGSSEGGCSRRSSVTVEERARERVPYGVSVVERNARVIKWLYGLRQARESPAAEG

SEQ ID NO: 2003 - DNA, 401 bp, Homo sapiens
gtggccggtgcgcggggcccgcgcgcgcgggatgggggtctcggtggatgtgcaccaggtgtacaagtaccccttcgagcaggtggtcgccagctttctccgaaaggtttccacgctttgagaaggactgaatgagatcatgcgcatggcagcttctctaggatagcaccctgcgtgaacacagtagctgctcagttaagtctttgatgggtgtgatcctgattcagcttgatcaattctgcagtcatactggattgtgtttgaaaaggtgtccagaaaaacctggccatctgcctcctgtcttcccagtaccccaaccccatggataaaaatgtcatctcagtaaaaatcatggaggagaaaagagatgaatcaacaggggtcatctacagaaagaggat

SEQ ID NO: 2004 - protein, 64 aa, Homo sapiens
MTPVDSSLFSSMIFTEMTFLSMGLGYWEDRRQMARFFWTPFQTQSSMTAELIKLNQDHTHQRLN

SEQ ID NO: 2005 - DNA, 709 bp, Homo sapiens
  misc_feature (14): Wherein n is one of a or t or c or g
catgtccccagcancccattccatccccaaccctataggaattgagttcaccctgaattctgccttggaactggccccttgctgcatctgtccaggccatgctatgaattcagactcaaactgatggtgaatggagaaaaatgaggagtcgagcctaatggggcccttcccaggtatgcaaaaggcacacctacacctttgaaccaattggaaaagaatgtggacaaaagatcacatccaagccgggtgcggtggtgtgcacctgccgttccagggactcaggatacagaagtgggtggatcacttgagcccaggagttcaaggctgtagtctgtagtctgctatgtgtgtgtctgtgaatgaccactgcactccagcctaggcaacgcagtgagaacttatctcaaaaaaaaaaaaaaaaaaaaaaatcacatcctttgctggaaacatcgcctttaagggtccctgttgtgaaacacgagtgcccatgtagcttccccacagatcttatgattccttttactgttcgacttgaaacccacaagagtgtgacgtgggcatgaggataggcatgggtttactggtttactagatgggggccgccaggacctccctgagaagctgaagccccctcccacagtaaccgtcctctcccctctgatgacacagaatgggccagggctgctcattttggctgaaaatcacagct

SEQ ID NO: 2006 - protein, 61 aa, Homo sapiens
GVEPNGALPRYAKGTPTPLNQLEKNVDKRSHPSRVRWCAPAVPGTQDTEVGGSLEPRSSRL

SEQ ID NO: 2007 - DNA, 490 bp, Homo sapiens
aaaagtggcctctcttccggaatgacacatactgacttttgaagaagcaaaaggatacctgctggccagtcatatcagccaaaaaactctggtgagcagtgagttggcagatgttgcaactggaagactgtggcatcaacagagccccaaagcaataatctctctttctcttcgcccccactaatccagcaatcaaataatcacttttaagcatttactgtgcaccaccatataacataaaatgtgatgaatagctaggtatatatatgacaacctctaaattctcaaaatattataataaattaagaaagcaagagttgtgcatgtaaaaagacaattaactacatagggaggaggcagtgaacacatttagtgcatctcccctgtaccggtcactgtgtgaggtgctgttacaagtactaattttatcttaatccccaccaaatccgggggcggcctttctatccttgttctgtggggtggtgtgggg

SEQ ID NO: 2008 - protein, 71 aa, Homo sapiens
MLKSDYLIAGLVGAKRKRDYCFGALLMPQSSSCNICQLTAHQSFLADMTGQQVSFCFFKSQYVSFRKRGHF

SEQ ID NO: 2009 - DNA, 444 bp, Homo sapiens
ttttgactttcagatttgtttacgaaaaaaattaggaatctatcaagaaacagtaagctctgtaggtatccaaaggcctgacagcaaacgctctgctaagttagcgctgccgtctcctggggtcaatgcactcgagtggcgtttcctgggctaactctactgtaagaagctgtcaacccggatacggctggacgccggacgcccgacctcgactgcagctgcgggcggacagggcaccgggctcatccgagggcgcgcggatggacctactctttttctggtaaatggtcctaaaatgaaacctggcgtttaacatggacactcagggggtcgccctgaaacaaaagggggtgcgaggcgtggcccgcacgtgcgagcccgggaggcccgctttcccgcggagggcgcgtttccaacgcccccccggacaccacatccacgcgt

SEQ ID NO: 2010 - protein, 52 aa, Homo sapiens
MHSSGVSWANSTVRSCQPGYGWTPDARPRLQLRADRAPGSSEGARMDLLFFW

SEQ ID NO: 2011 - DNA, 499 bp, Homo sapiens
  misc_feature (231)..(494): Wherein any n is one of a or t or c or g
ggatcctcgctgaaccgaggcctcacactgcctggttagagtctggagtgtaatgcttggctcttctgagacgtctgttggcttttcacacaaccaccccactcttgggttctctgtcacgtccagaatctcccccttccaaaataataataaaaagcatggtggaacttgttaagaaaattcgagcccaaatcctgtggcagttagggagggttgagtactagtcgcgancgacttggtaancgtgggaaaacccacaatggaacgtgtctttttgcatgacatgccttttagtggtttccacagtttgggagnacagtatcgattctcacctaacatgaaaactgttccanatggagattctaaaataggggagaaattcctagnacatctggctaaacactgacaatatcccccgtcctagtgctttttggtgtctcattgtggccactgctgctcagttacagccagcagccatattgataaataatagnagtag

SEQ ID NO: 2012 - protein, 55 aa, Homo sapiens
  VARIANT (9): Wherein Xaa may be any one of Ala or Pro or Ser or Thr
  VARIANT (33): Wherein Xaa may be any one of Ile of Leu or Phe or Val
  VARIANT (37): Wherein Xaa may be any one of Ile or Leu or Phe or Val
MLGENRYCXPKLWKPLKGMSCKKTRSIVGFPTXTKSXATSTQPSLTATGFGLEFS

SEQ ID NO: 2013 - DNA, 1059 bp, Homo sapiens
ttttttttttatcatttcccaggggattaaaacttatacattttatacatttcataaacaacgtttcaccacaccaaaatattgttgaattatagttaaaactggatttataaaccgagtaaactcaatagtactgtttagtcctttataaatttggtgatagaaaaaaaaggaacattaacagctttagataagtgtagagctagctggcagttattaatagattttatttggcctaatactatgaaggctcttcatgccctgtttttatcttataaaccaaaaaatgccaatacacctttacaagtatattctgaagggcctcttaaaaaagcaccctatgactcagtatttaagcacaacagcagctaaagatacgcagcaaactgaagtggccagctaaaagaaaacagatctttctcacaaatacagcaattatattaaatatatttattacgagtataaaatggtttttaaaaagcccaaatgattctgattttaaaacttgatgacagatccatcaagtacaaacgtgtcattcaatagtggttattttttcctggtcacctcctccctattttttcagagagataaatatttgcctaatactgtgtttaacttcttccaagacttacctgagactcaaaactgtggccatggatattcattaaaaactctatcactgtggcacaatttcttcttctgcattttggagcttgtttaggaatgctaggttccaggaaactgtataaataaagccaatttagtgagaaaacagtgcaacctggttgtctgaagtgcctgatgaatttcacctaatggtgtaaagggcactcccaggtgctttgacaggttcacacagcaggactgggtgagattactgactttgtatatgtctatgacatttacacacatttgggtatttactgtacatactttaaaatagtggttaggtgctgtcattttcatgattttgacagttgagaaaccatgttagggagagagctttgtgcgacaccctaatcagaccgtgaagggacaggtctgagttgttcatag

SEQ ID NO: 2014 - protein, 79 aa, Homo sapiens [sequence omitted]

SEQ ID NO: 2015 - DNA, 479 bp, Homo sapiens
  misc_feature (1)..(338): Wherein any n is one of a or t or c or g
nacgcgtgaatccgtgtcccgccagcagggcgtttacggcctggtggggcggaaacggacccgacaccaccgcggcgtcctggggcttctgggaatcccatcagcgcggccagagcggccggggacaggctccgaggcaggcccgacccgcctcccnncggcgccgccgtggctcgacggagaccagctagggtgagtgatcgagccacgcctggggtcccggcctgtcaccccnngaagtccccgccgcctnntccaccctgtcaggctccaactctgggctccggcgcggtcccacctccggggggaactcccnctccatcccctccatttcctnntcatcctcgactcccgctatcttttcggacctgcggcgctccccctggacgcacggcgccccctccccagccggaccggcggtctgggagcgcggatcccttcagctcccccgcgccccagcatccggatcagggctcgag

SEQ ID NO: 2016 - protein, 156 aa, Homo sapiens
  VARIANT (50): Wherein Xaa may be any one of Ala or Arg or Asn or Asp or Cys or Gly or His or Ile or Leu or Phe or Pro or Ser or Thr or Tyr or Val
  VARIANT (76): Wherein Xaa may be any one of Ala or Arg or Gln or Glu or Gly or Leu or Lys or Met or Pro or Ser or Thr or Trp or Val
  VARIANT (82): Wherein Xaa may be any one of Ala or Arg or Asn or Asp or Cys or Gly or His or Ile or Leu or Phe or Pro or Ser or Thr or Tyr or Val
  VARIANT (103): Wherein Xaa may be any one of Ala or Pro or Ser or Thr
  VARIANT (110): Wherein Xaa may be any one of Ala or Arg or Asn or Asp or Cys or Gly or His or Ile or Leu or Phe or Pro or Ser or Thr or Tyr or Val
IRVPPAGRLRPGGAETDPTPPRRPGASGNPISAARAAGDRLRGRPDPPPXGAAVARRRPARVSDRATPGVPACHPXKSPPPXPPCQAPTLGSGAVPPPGGTPXPSPPFPXHPRLPLSFRTCGAPPGRTAPPPQPDRRSGSADPFSSPAPQHPDQGS

SEQ ID NO: 2017 - DNA, 1208 bp, Homo sapiens
gaattctctttgcgcacaaatgatcttattacacatcagagaattcacacaggagagaaaccgtacaaatgcagtgactgcgggaaagccttcactacaaaatcagggctcaatgttcatcaaagaaaacatacaggagagaggccctatggatgtagtgattgtgggaaagcttttgcgcacttgtctatccttgttaaacacaagagaattcacaggtagtcattttgggaaagcctcttgccagatgtaggcccttaagatatctgcaaagaagagtaatttcatgaatgcagactacatggttgtttatttagtgatcagttacttcatgttttgtgtcagagaaaacatgtacaaaacatttgagaaaatattttaggacattatgtctaaaaattgtatactgagaaaaatcctatgaatgtggcagactataaaagcctttggtgggaagataaaccccctcagaagtgatcatagatcatgaataaactactaattcgtggaaatgtaataattataggaacgtctttgcccaaaaataaaacctcaacagattgagagagttcacactggagaaatactttcctctggcaaacccctgtggcagggttttcagtaaaatgttttgcctcatcgtgtgctaggaaataatgcagaaaaaacttatgaaaacattcaatgtagaagacttttaggaaaatatcagagaatttaatgaaggaaagaggccgccttttttttttttttttgtagctttaagaaatcttaacacatatattgattcatgtcaccaccaccgtaatcgagattcagaatgttgcatcaatgcaaactccctcatgctccttgtttatagtcacaacctctcctcagccctaacccttggcaatcagaaatcttttcatctttagttttgtcattagtagcatgttataaaaatggaatcatacagcatgtacccttttggtattggctatttcaactaaagcagattaacctgaaatccatccaagttgttctgcatatcattgttctgtttttattggccactaataatctatgatacgaatataccactatttgtttattcacccactgaaggacattagttttgttcccggtttttcttactgttacaaataaaaatcctatgaacatttgtacaaaaaaaaaaaaaaaaaaaaaaaaaaaaaaaaaaaaaa

SEQ ID NO: 2018 - protein, 73 aa, Homo sapiens
EFSLRTNDLITHQRIHTGEKPYKCSDCGKAFTTKSGLNVHQRKHTGERPYGCSDCGKAFAHLSILVKHKRIHR

SEQ ID NO: 2019 - DNA, 1186 bp, Homo sapiens
ttttttttttagcatatccaaaaatggtattgctttattttttaaaaatatatttcttttttgaaatatcaatcgaatcaattttattctcacaacaatcctgagtaaatatttttaaaaaatatattttttgaggaaacagattaaaagctttaaaaaatgtgattcactgaaaatcaaatagtgaatacatgatagagtcagcactaaaaaggcagatatatcaaagagagactgaaataagcaactcattttttgcatcgacttcgaaacacctctttaccatcagtgtttgtaataatcattcttgatctttatacttcacatttcttggtaatccaaatgcttcataaattctcttacacatcctgaatctcttgcttcattcagcgagataattcctggtgagcaggaatgcatatggttttcagatgtagaaactgggatctccagagacaaacaagttggccatggcaatgggatacaataatcttataggattttacaaacctgatttgaagttttgtcctaatatggaaaggtatgccttttctcactagagagattattctagaattttagagccataccaacatatttcacggtaacctagtgatctggattgcccctctctgagaaagcaaagattctgcaagcaattagtccttcaaatcaaattcctggcttttacaaactgcttctcttttgaattccaaaagttaactaattcttttctatctattcttcatttcctcataagcgaacactcaccagtttccccattttccaaccctatggttttcttattctacgtggccacagacaggaacaattcactagcacagtggttctcagaatcacctggtaagtcttgtaaaaacacaaattgctgggccccacgtactcccagagtttcacattcagttggtctaaagtggggcctaacagttggaatttctaacaaattacccggtgatgctgatgctacaggtctgagtagcacatttggaaaatcacttcactagtacacccccgacgtgttgtcctgatggatccttccaaaaaattgttcagatgccaaggcttgtgaatcgcacacatggtactcaatgcctgggcctcacatcgaaggcttctatattgagaagaaaagaaatatttgtcatgactcattgcctttttcaag

SEQ ID NO: 2020 - protein, 76 aa, Homo sapiens
MVFLFYVATDRNNSLAQWFSESPGKSCKNTNCWAPRTPRVSHSVGLKWGLTVGISNKLPGDADATGLSSTFGKSLH

SEQ ID NO: 2021 - DNA, 622 bp, Homo sapiens
  misc_feature (298)..(458): Wherein any n is one of a or t or c or g
ttttttttttttttttttttttttttttatagctaattattttattacaatgttttcagaattagatctaggtgacataaaatacacaaaagcataaagccatctgaatagtacagtcaacaagcaacaaccagtacaatcagcaataatagagaacttttaactttgtatgtcacagagaatgtatatacctttttaataaaaagcctgaataaaccaataactattaaagaaatcacaaagctgattaaaaatctactattaaaagtgtcatcaggattagattgttttacacttntgtcctagctaacttttaacaaacaaataattctaatgctatttaaattattccagaccacaggaaaaaaattgaaactcacatactcatatttttttaacgctagcacaacttcaataacaaaacttgataaagatagcatcagaaggacaaaatacnnaattttactttggaatgaaaatgcaataattctaaattaaatactggtaaataaaatccactcatgtagcaaatcattatttcacaatgaccaagtagtatttgttccagaaatacaagtttggttccacatcaaatgcctaccattctaattcattctcgtgc

SEQ ID NO: 2022 - protein, 64 aa, Homo sapiens
  VARIANT (63): Wherein Xaa may be any one of Leu or Met or Val
YSQQATTSTISNNRELLTLYVTENVYTFLIKSLNKPITIKEITKLIKNLLLKVSSGLDCFTLXS

SEQ ID NO: 2023 - DNA, 490 bp, Homo sapiens
tggccaaaggctgcattttcaatattagacaaaaaaataatttgctaaaagtgcaaggttttcgtatctgctggtgtaactgcagtgatggcttaacaaatttctttttttataatggtctttacgctggattcatttatcttgaaatgttgggcaactgcagctgtagacttcaatctgtggtacatatcaagcaattcagctttttcttgtaatgtcacgacttgttttctgcttcttgggagcacttccagcatcagtagtggcacttcatatgggtcccatggtgggattcaaggtttacagtattgcactaagcatgatgaaaaataccacaaaaactgcaagaaatcactttttccatcttactgggataccagatgtcctggatatgaactgctgaagcggggatgggtagtgtcacacacgttttaagcagatacttgcagcgcttgagctcactacagtaacaacaggaagtggctacatt

SEQ ID NO: 2024 - protein, 106 aa, Homo sapiens
MVFTLDSFILKCWATAAVDFNLWYISSNSAFSCNVTTCFLLLGSTSSISSGTSYGSHGGIQGLQYCTKHDEKYHKNCKKSLFPSYWDTRCPGYELLKRGWVVSHTF

SEQ ID NO: 2025 - DNA, 1095 bp, Homo sapiens
  misc_feature (1)..(2): Wherein any n is one of a or t or c or g
nngcagctcggggtgggtggctcatttcctggccgctcctgtacttcgcggaaagaagtgacattactcacactccttctcaagcacagaaccagttgtactgagctttttgctaagctgtttcagccaagaatggctgtggaatctggagtgatttcaaccctgatacctcaggatcctccggaacaagaactaatactagtgaaagtagaagataacttttcctgggatgagaaatttaagcagaatgggagtactcaatcctgccaagaattgtttcgtcagcaattcagaaaattttgctaccaggagacacctgggccccgggaggctctgagccgactccaggaactttgctatcagtggctaatgccagaagttcacacaaaggagagattcttagaactgctggtactggagcagttcctgagcattctgcctgaggagctgcagatctgggttcagcaacataatccagaaagcggcgaggaagctgtgaccctgttggaggatttagagagggagtttgatgacccagggcagcaggtcccagctagtccacagggaccagcagtgccatggaaggatttaacatgtctcagagcatcccaagagtcaacagacatccacctccagcccttaaagacacagctgaaatcctggaaaccatgcctttcccctaaaagtgattgtgagaacagtgaaacagcaacaaaagagggcatctcagaagaaaaatcacagggactccctcaggaaccttcatttcgaggaattagtgagcatgaaagcaatttagtgtgggcaaggaagtgctacaggggagaaactaagatctccttacaagggggcagttttagtcaagtgatcttcacaaacaaatctctaggaaagagagacctttatgatgaggctgaaagatgcttgattctaactacagactctataatgtgtcagaaagttcctccagaagagagaccttatagatgtgatgtaagtgggcacagcttcaagcagcattcctctctaacacaacatcagagaatccatactggagaaaagccctataaatgtaaccagtgtgggaaggccttt

SEQ ID NO: 2026 - protein, 365 aa, Homo sapiens
  VARIANT (1): Wherein Xaa may be any one of Ala or Arg or Gln or Glu or Gly or Leu or Lys or Met or Pro or Ser or Thr or Trp or Val
XQLGVGGSFPGRSCTSRKEVTLLTLLLKHRTSCTELFAKLFQPRMAVESGVISTLIPQDPPEQELILVKVEDNFSWDEKFKQNGSTQSCQELFRQQFRKFCYQETPGPREALSRLQELCYQWLMPEVHTKERFLELLVLEQFLSILPEELQIWVQQHNPESGEEAVTLLEDLEREFDDPGQQVPASPQGPAVPWKDLTCLRASQESTDIHLQPLKTQLKSWKPCLSPKSDCENSETATKEGISEEKSQGLPQEPSFRGISEHESNLVWARKCYRGETKISLQGGSFSQVIFTNKSLGKRDLYDEAERCLILTTDSIMCQKVPPEERPYRCDVSGHSFKQHSSLTQHQRIHTGEKPYKCNQCGKAF

SEQ ID NO: 2027 - DNA, 1188 bp, Homo sapiens
gacaaaaaaggcagcagcaggcagcacagataagactgatccaagaggtggaactcaaagcttcagctgccagatagagaaatatacttacttagaacttcccttcatcgagaaagagaacaagcgcaacaacttcatcaacttcttgcattgaaagaacaggaacacaggaaggaacttgaaacaagggagttttttactgatgctgacttccaggatgccttagctaaagaaatagccaaagaagagaaaaagcatgagcaaatgataaaagaataccaagagaaaattgacgtgttaagccagcagtatatggatttagaaaatgaattccgtattgctttaactgttgaagccagaagatttcaagatgttaaagatggttttgaaaatgttgcaactgagttagcaaagagcaaacatgctcttatttgggctcaacgaaaagaaaatgagtcttcctctttaattaaagatctgacctgtatggtaaaggaacaaaaaacaaaactggcagaagtttctaaattgaaacaagaaacagcagcaaatttacagaatcaaatcaacacccttaaaattttaattgaagatgacaagcagaagagtattcaaatagaacttctcaagcacgaaaaagtccagcttatttctgagctagcagccaaggaatcactaatatttggtttaaggacagaaagaaaagtatggggacatgagctggcacaacaaggatcttctctagcccaaaatcgtggaaaattggaggctcaaattgagagtttatctagagagaatgaatgtctgcgaaagacaaatgaaagtgatagtgatgcattaagaataaagtgcaaaatcatagacgaccaaactgaaactattagaaaattaaaagattgtttacaagaaaaagatgaacacatcaaaagattacaagaaaagatcacagaaatagaaaaatgcactcaagaacaacttgatgaaaaatcttcacaactggatgaggtacttgagaagttggaaaggcacaatgaaaaaaaagaaaaactaaaacaacagttgaaaggaaaggaagtagaacttgaagaaatcagaaaagcttacagtacactgaatcggaagtggcatgataaaggagaacttctatgtcatcttgaaacacaagtaaaagaagtgaaagaaaaattt

SEQ ID NO: 2028 - protein, 383 aa, Homo sapiens
SKRWNSKLQLPDREIYLLRTSLHREREQAQQLHQLLALKEQEHRKELETREFFTDADFQDALAKEIAKEEKKHEQMIKEYQEKIDVLSQQYMDLENEFRIALTVEARRFQDVKDGFENVATELAKSKHALIWAQRKENESSSLIKDLTCMVKEQKTKLAEVSKLKQETAANLQNQINTLKILIEDDKQKSIQIELLKHEKVQLISELAAKESLIFGLRTERKVWGHELAQQGSSLAQNRGKLEAQIESLSRENECLRKTNESDSDALRIKCKIIDDQTETIRKLKDCLQEKDEHIKRLQEKITEIEKCTQEQLDEKSSQLDEVLEKLERHNEKKEKLKQQLKGKEVELEEIRKAYSTLNRKWHDKGELLCHLETQVKEVKEKF

SEQ ID NO: 2029 - DNA, 804 bp, Homo sapiens
ggatccagggccagctgatgctgggaacagccgtccttgccctgtgcctctccacactgcgagagcccctgcagcccagaggggctccacctcccctgcaatggggctcaaaagacaatccttctacggggctggcaggacagacgtgacaggaacaacgatggcctgctcctcccggaaggtggcttcaagagcactcaggaggtgacagatgctgtcaagaccggcccagggaaggcacagggcaggtttcccagcacccaccacgcgccagcgagcacagagccttcgcctgaaccatccaggcaccgcgccctccccctccgcacacacaggagcccagctgcgattccctctgctccacaggagatgcagcgagcaccaaagagccttcctccaggatcaagcctgatgcagaagtggttacactgactacggcaagctgagccctgccggctgttgtgcgctccgtggaaagggagaagcacggtctccagcggctgcgtcaggagtggtgccttgtgcacacctcacagggagagaagtctccaacggactgagcggaggaaaaaagaaaaaacgagaaaaggaaaaagagctgcatacctggcaggcctactgtgtgcaaagcccttgagtgacacaccctatgacccacagcactgtggcaatcccagggccgcaccagctctctctccttcccctcctcagggccacaccaactgtggggttccagctatcactctgtgcaaaggactcctaacatgggtgtcctccgtctcaccccataagccacacaggcct

SEQ ID NO: 2030 - protein, 66 aa, Homo sapiens [sequence omitted]

SEQ ID NO: 2031 - DNA, 781 bp, Homo sapiens
ttttttttaatgctttaaaaactgtatttgtacaacaggataaaaacagtttttctttcggatgccagttgcaagtttccatgtaacgtatcttaatctacattcccaaagtaattgtgtctcaggtaacctttgccctgcccaaaagatgaacaaaaataaccagaaaggtaaaaatctgtctttggagttgggggaatcactggccacttgcaaactgccacttcactgccaacttttatccaagaaaaccggtttctaaaaacctgcaaaagggacatttaagaggaagctgttccctgaacgaagactgagcaggacaagccaaaagcggtgccaggggacaatgccagatggggaaagtaggagccgggttgtgagacggaaacacacacgccaagaacagccagggagcaaagcgaggagttctggcttctcgtaactcatgaaggatgaatgctcatcgtttaaatttagacgataaagctgatgatgacgggcccgggggcggctatggaaaccacctcattacgagtccacgagaaaagagagtatgggaggaaagagggaggcggtgcactcagcgggggccagacacaagagacagatgagctcgccagcagtgccttcccagcagcccaggggacgcgtgtgcttccacataaatccttgggactgaggacttggctgctgagaaaagaaacacatcaagcattgaacataaagaggcaagtgtggtgtttagagagcacgagcgctcactcttattccagggaggaag

SEQ ID NO: 2032 - protein, 97 aa, Homo sapiens
MMTGPGAAMETTSLRVHEKREYGRKEGGGALSGGQTQETDELASSAFPAAQGTRVLPHKSLGLRTWLLRKETHQALNIKRQVWCLESTSAHSYSREE

SEQ ID NO: 2033 - DNA, 437 bp, Homo sapiens
agctgatcaagaaatgttggatggaacaccaccaacagaatttactgaaggttctgccctggggaggagtgaattctgagggtcccacaaatctttctctcagaagccccagaaacagcaatagacagttgctgaaaagcagaaaagcaatgtcgaccttcattctgagcccaccacattgttttgttgcaatgggagtaacaaagaagaatctggagaggctgccctagtcctaccctgggaaagggagtagattgggtcatgctacatagcagaggagaagggtactcaggacagatgagcctgggggaggccaactctatctgggcatcaacaattccggccagggctggtgatgtcaggttactttttaaagaagaaggcttcccttccaaacagaaagacaacactttgatttgtgtgccaggttccctgaa

SEQ ID NO: 2034 - protein, 73 aa, Homo sapiens
MTQSTPFPRVGLGQPLQILLCYSHCNKTMWWAQNEGRHCFSAFQQLSIAVSGASERKICGTLRIHSSPGQNLQ

SEQ ID NO: 2035 - DNA, 821 bp, Homo sapiens
  misc_feature (803): Wherein n is one of a or t or c or g
aagcttgctggaaactcttcctttctcgtgaccctcacgccccatcagccacttgcatacattctaaattgtacgttgaagtttttcccactttatttgggggaaccgttttaaaagtaatctggttttcgcctgaaataggaagacagtaacctccagtcaaaacatgtgcagcagaatgggatttggtgtttttcgacgccaaagaacctccacccccccacccccaccccgagcttttggaatccatttcgcttttgtaaaacgtgtgcttcgtctgtaaaaactgagcaaggaatagaaacattcgtagctctacagtgagtgcctgtcacacttcacatccatagagccttttgtgaacttttataagattcagaattcagcttgagcaccagtgacagcaattgttacatttattctagaatgctaaattaattcgattttaaactgattattagcctcggtgtgccgttcctaaaggcttgtgactttaggtatttccaagatgcccttaagtctctgcttaccactttcctccctccccgaggcatcctggatgttgggactgtgaatccaggtctccgttatctaaatggttgatgttagtgtttcctgtcatcacgtttagtatgcttgttgccctttactatcattatagctaaaataatactgctttcagagatgtgttgtataatcgcataataatttcagaacgccttcatattgaaccagatatgaagtgatacagtatcatttattcaaactgcctaaaaagtaaaaagtataaaccatatactatntttaaaacaggtaggtta

SEQ ID NO: 2036 - protein, 90 aa, Homo sapiens [sequence omitted]

SEQ ID NO: 2037 - DNA, 605 bp, Homo sapiens
ggaaagcggaaccaccaaaaggagtgatgatcaacgatctatgataaatctgatgctagttctatgcctcagacatcctactgggaacgacacaccagctcctgggatcagactttcatctacttaggacccctctttgcccagactactaaagccagtcttcactagccacgaatggctacccaaaggaaacacttggtgaaagattttaatccttacattacctgctatatctgtaaagggtatctgatcaagccaacaacagtgacggaatgcctccatacattctgtaagacttgtattgttcagcactttgaagatagcaatgattgcccaaggtgtggcaaccaagttcatgagacaaatccattagaaatgttgaggttggacaatacattagaggaaattatatttaagctggtccctggactacgagaacaagaacttgagcgtgaatctgaattttggaagaaaaataagcttcaagaaaatggacaagatgatacttcaaaagctgacaaaccgaaagtagatgaagaaggtgatgaaaatgaagatgataaagattatcacagaagtgacccacaaattgctatctgtctaga

SEQ ID NO: 2038 - protein, 143 aa, Homo sapiens
MATQRKHLVKDFNPYITCYICKGYLIKPTTVTECLHTFCKTCIVQHFEDSNDCPRCGNQVHETNPLEMLRLDNTLEEIIFKLVPGLREQELERESEFWKKNKLQENGQDDTSKADKPKVDEEGDENEDDKDYHRSDPQIAICL

SEQ ID NO: 2039 - DNA, 1390 bp, Homo sapiens
  misc_feature (1388): Wherein n is one of a or t or c or g
gagttgaatgtgctgtgcaatggtgaaattatggggaaggatcatactatggaattcatctacatgacaagatggcgactaagaggcgaaaactttcggtgtctgaactgctcagcttcgcaagtctgctctcaggatggccctttgtatcagtcataccctatggtactgcagtatcgaccaagaattgatttcggttagaccaaggggcccagacctcactgagatgaatcctgcactatttgtttactcgtcaacagattgcacagttaacggtgtgtggactagaggaacacaaccagattttcagcatgcaaataaggccattgtctatctctaaattgtcagttgcattcatgttgtttctattaggagcaaaccaagtgccattctgctactgaaccatctgcataaggtatttgtgttgtctcaaagtgtgcaagtcatggtaaaaatcagttagctgtgccgccatgattcacccttctgaatattttgcttgcctgttccaagattgttctaatgtttaattacactagtaaaatggctcaatttttgtggtgttgcagttttcacatacttactcttttattcttgtttaaatagcgtactctacaagaaactaataattatatcttgaaattattttgtatggaaatatatttagaaaagtggtttttgagccactgtcttgttcttgataagctttttgtgtgaaaaaaagttcattcttgagtgtgcaagtccttttgccaagaattccaattattctgtaacattagagcacaatataattgtagacattctaagcatctgtccgtgtagtctaccaattgcacaaggaaggcatgttagccctccagattgaaaatgtatgtgacctcttgaactgaagttagattcccaaccattcaaaatgttggcagctgatcacatttacttctgataaaagtaatgtgtaagtaaggttaatcttctttcataatgccttatgacaagcaggtgctgcttcatgaaacgtcattgtatagcccatttcatgtatcattacattgttgctgttatttaatgagtgcattatttctctttttaagttggccttaggtatatgtcattgtggcatgcagagggttatgacgattttaaatattaggatttttagagcacataacattagctattttatggatttcaaaagtctcaaaacagttgtagattaaaactgttagttacctttcacatttccaaactatgtgcataaaatagaataaatgcagtatagaactatgctaaccaaaattaataggttaagggtattttattttaaatcctgtagcaattggggaaatgagaagattattattttatacatgagttcattaagatcnga

SEQ ID NO: 2040 - protein, 66 aa, Homo sapiens
ELNVLCNGEIMGKDHTMEFIYMTRWRLRGENFRCLNCSASQVCSQDGPLYQSYPMVLQYRPRIDFG

SEQ ID NO: 2041 - DNA, 1076 bp, Homo sapiens
  misc_feature (460): Wherein n is one of a or t or c or g
tgagccgagtggccccacagagccggcgcgctcccgcctgcagggggagagcagacggggcgcggggaccggccaggccgcggcgggtgctgtttctgtttcactttccttcactctgaggccggcgcgctggcgggcgaggagcggcggcggtggcgctcgtgtacatgggaaagcggaaccaccaaaaggagtgatgatcaacgatctcatgataaatctggatgctagttctcatgcctcaggacatcctactgggaacgacacaccagctcctgggatcagactttcatctacttaggacccctctttgcccagactactaaagccagtcttcactagccacgaatggctacccaaaggaaacacttggtgaaagattttaatccttacattacctgctatatctgtaaagggtatctgatcaagccaacaacagtgacggaatgcctccatacantctgcagaatcctactggatgtccacttggatgtcctgaagccacctgaaactcagcatatctacgaatgatcaaatgggatgccagcactcagttatccaagcaagaaatatgctccatgcttgactctttaccctcactaacaaaactgggcaaagtcctgctggtctctctctttaatacttctcaaatctgtccctttagtttcatccctctgttactgttctcattcagattcttattacatctcaccaaagccactgcagcacattcttaactgtgtccaagtggtaataattaaaaacagcttactgtctttatcattatcactcttaacccaccctaaaatttcctaaaggtatcccgttgacctcaggatacattaaagctacttagtggtgactggtttctgcctaccacttcctcccctaccacctaacactcacacatacaaatacttggttcaactgtttgctctccttgaaatgaatgcctcctctgtgcccagctagcagttacccatcctttaaaactcatcccctctaagatgtgccctaccacctgcagatttgggttaagtgtctcaataaaatcttaaatgaataaatgcatggct

SEQ ID NO: 2042 - protein, 60 aa, Homo sapiens
  VARIANT (38): Wherein Xaa may be any one of Ile or Leu or Phe or Val
MATQRKHLVKDFNPYITCYICKGYLIKPTTVTECLHTXCRILLDVHLDVLKPPETQHIYE

SEQ ID NO: 2043 - DNA, 505 bp, Homo sapiens
  misc_feature (14): Wherein n is one of a or t or c or g
ggagatctccttcnccgtccctcttcctttccgagaagccgcgttccgttgttgaactacgtttcccagcgtgccgcgcggccgagagcgtggactcgaccagcccttcctctttgcctatcagctcgtcgcagcatgatgatgcaaatgcgtcgggcgccgatgagtgacgacattctggctcgcgaccgcggcagccgccttagcaggggtaataggcgcaacggcggcggaggctgcagggacgacgacgacgacggcggcggggcgggcgctgtgcgcacaggggaggggtaggcgggcgtcgccagcggcttcaactgcggcagctacggctagggcgacggaagaactcccaccagtcggcggtcgagttaggcctcagcaccgcggggaactgttcgtgctgtcctctgcgggagatctccatagagaccgtgacacacacagaggcgggggtccgcagaggcggccggaccggagcctcctcggcctctgcggccgc

SEQ ID NO: 2044 - protein, 98 aa, Homo sapiens
  VARIANT (5): Wherein Xaa may be any one of Arg or His or Leu or Pro
GDLLXRPSSFPRSRVPLLNYVSQRAARPRAWTRPALPLCLSARRSMMMQMRRAPMSDDILARDRGSRLSRGNRRNGGGGCRDDDDDGGGAGAVRTGEG

SEQ ID NO: 2045 - DNA, 504 bp, Homo sapiens
  misc_feature (502): Wherein n is one of a or t or c or g
ggcacgagtcgagatcgccgccgctctcacaatggcttgggtccagactgcgccacagcctctcgggagacgtgggccctcggaacctttttagtgccggactccgggccgcaggcagtcccgcggcagcaggatcacagaacctctggatggactcttcctgggaagctttgctactttgcagcagctggaccatgttcctcattaacatctgtctgtccgcttagtcatcacatcatttcactgtggtggcagggactcagctcggaattctgtatagaaaaagcacctggatcccagtctttcaatggcttcaagacaaccagaagtgcctgctcttgaggctagtgcgccctctaggcaagatgtccctgcccatcgggatataccgccggggcagtcagctatgatgataccctcgaggaccctgcgcccatgactcctcctccatcggacatgggcagcgtcccttggaagccagtgatttcagaacgcaagtatnaa

SEQ ID NO: 2046 - protein, 70 aa, Homo sapiens
MLMRNMVQLLQSSKASQEESIQRFCDPAAAGLPAARSPALKRFRGPTSPERLWRSLDPSHCESGGDLDSC

SEQ ID NO: 2047 - DNA, 605 bp, Homo sapiens
  misc_feature (674)..(680): Wherein any n is one of a or t or c or g
tttttttttttttttttttttttttttttttttttttttgggaaggaatgtacttttattgaaaatgaaaaaatataaaagtaccatcttcaaagagcatctcacaaacactgtacagcaggtgaagcattgcagtaacatacattgaaacatacagagtcgagttatacaggactagccatctaacaggtcatctggtctccgacggttgtttaacgacacacagtagaaatagagaatagaacccatatctgtttccagagtccaaagtagtatatcaggctgacagcactcaatcagtgagggctcctgaggttgcaatgattctgcaacggagtagattctctaggaaaaaagaccttgctgctaaggaaagagaattaaaaacaaaacaaaacgaaaagctccccaaagaggtactctgctcaaaatggctggtgctactggtgcactaagttgtgaggaattacctctgctcgggacagaataaaaaatcctaggcctcaaggaaaaactggtggcatccttctgggtcttttcaagtccttgcatctaaaaatcaatcttgacaannaatannacaaaaaaccacaacaaaagaaagc

SEQ ID NO: 2048 - protein, 61 aa, Homo sapiens
MQGLEKTQKDATSFSLRPRIFYSVPSRGNSSQLSAPVAPAILSRVPLWGAFRFVLFLILFP

SEQ ID NO: 2049 - DNA, 466 bp, Homo sapiens
tggccaaacaaggacactttgttttattactgctttcctgagaagcctttcaaggcacaaagtctccaccagaatcgaatcacatacctccgtctaactagagctggtcctcccacatcatcagacaactggatggagtttgtgggctgtttaaagcatatggtttgtaaatactgtaaaatcaaacattacttatggcttttatttactgcagcatttcacattacctagcaccaaaatagctgaggaggtcttctctgcctttgttctttctcctgttcttttccttatgcttctttgctccctgccttccgcagcagcggtttctctgctctgattcttcctctccccactgcccagccctcctcctgcaccatctgcccaccaactccacaccgttctcttccctggccccactcaccctctccctttcctccccctgtgcctctcacgctgccccttgatc

SEQ ID NO: 2050 - protein, 73 aa, Homo sapiens
GGLLCLCSFSCSFPYASLLPAFRSSGFSALILPLPTAQPSSCTICPPTPHRSLPWPHSPSPFPPPVPLTLPLD

SEQ ID NO: 2051 - DNA, 397 bp, Homo sapiens
  misc_feature (1): Wherein n is one of a or t or c or g
nagagtaccagtaccagtacttccaccagcactatctcaagcagcaacaatggcaaacgtgcatctgccagtggccagcagccagctgcatcccgttacctgcctcgtgaggtgcctccacgcttccgccagcaagaacagaagcagctattaaagagaggccagccattgcctacggggactctaaccagtgtgagcccaacccagggtgctgggcctgcaggggtaagcccacctcccctacctggagccggaacacagcatcatcccagtaagctccaaccagggagaaagagcaagaaacacaagaagaggaacgtttgatggaagaaaagaaaaagaaaaagcaggaagaaaagaaaaagaaggaaggtgctcagaaaaaggctgctgatca

SEQ ID NO: 2052 - protein, 107 aa, Homo sapiens
  VARIANT (1): Wherein Xaa may be any one of Gln or Glu or Lys
XSTSTSTSTSTISSSNNGKRASASGQQPAASRYLPREVPPRFRQQEQKQLLKRGQPLPTGTLTSVSPTQGAGPAGVSPPPLPGAGTQHHPSKLQPGRKSKKHKKRNV

SEQ ID NO: 2053 - DNA, 309 bp, Homo sapiens
  misc_feature (1): Wherein n is one of a or t or c or g
nagatcttcctgagcctgggcccggccgacgtgctggccgccgggctggtgtgccgccaatggcaggccgtgtcgcgggacgagttcctgtggagggagcagttctaccgctactaccaggtggcccgcgacgtgccccgacacccagcggccatgtcctggtacgaggagttccagcggctgtatgacacggtgccctgcgtggaggtgcagacgctgcgggaacacacagaccaggtcctgcacctcagcttctcccattccgggtaccagttcgcgtcctgctccaaggactgcactgtgaagatc

SEQ ID NO: 2054 - protein, 103 aa, Homo sapiens
  VARIANT (1): Wherein Xaa may be any one of Gln or Glu or Lys
XIFLSLGPADVLAAGLVCRQWQAVSRDEFLWREQFYRYYQVARDVPRHPAAMSWYEEFQRLYDTVPCVEVQTLREHTDQVLHLSFSHSGYQFASCSKDCTVKI

SEQ ID NO: 2055 - DNA, 374 bp, Homo sapiens
  misc_feature (188)..(366): Wherein any n is one of a or t or c or g
agatctcctgatggatgctgccggggcctttattgaagcacaacgagctttgcatgtagtggcgtctggagggtgtttcaggatcgctcctttgagcacacggggtgcagcgaggagactgcggcttctgctcctgggatgtgggctcctagggctttccactggcatcaggtggccacacaccgatngtagcactgaccagcatagtctcagcatgaggcagctggtccgaggtgcagcttatacctttctcaagggaggtgccaaggtgccaccactgctggagcccacgcagaagtgtgtgaatacttttcagccatgaaatgagggaaaatctgtcgattgtgatgacacggatggacccgnagcgacta

SEQ ID NO: 2056 - protein, 103 aa, Homo sapiens
  VARIANT (60): Wherein Xaa may be any one of Arg or Cys or Gly or Ser
MDAAGAFIEAQRALHVVASGGCFRIAPLSTRGAARRLRLLLLGCGLLGLSTGIRWPHTDXSTDQHSLSMRQLVRGAAYTFLKGGAKVPPLLEPTQKCVNTFQP

SEQ ID NO: 2057 - DNA, 419 bp, Homo sapiens
  misc_feature (1419): Wherein n is one of a or t or c or g
agatctttagaagataagcactaaaggaccaaggaaataaataccagaaatcaagaagagcacacactattttccttcatcaatccatagaaccctaatgcttctttagttccatcaaacacagaggaatgaccaccatggcagatggcaacagaggatgtcaacaattttttggagagagaagaggtactcccttatagggactcgtaaagacatagagcatctggaaattaactgcctccattacactgctgagtcacacacaacgcttgttatgtattcatcacttctctccagaaggctacattattggaattttgaagtcatgaaaacatcagatgaaccaacctgcaacaccttggattcagattggaagataaagagaaagtttacagaatgtggcctctaaaggccggtan

SEQ ID NO: 2058 - protein, 83 aa, Homo sapiens
MSTIFWREKRYSLIGTRKDIEHLEINCLHYTAESHTTLVMYSSLLSRRLHYWNFEVMKTSDEPTCNTLDSDWKIKRKFTECGL

SEQ ID NO: 2059 - DNA, 256 bp, Homo sapiens
  misc_feature (1): Wherein n is one of a or t or c or g
ntcatgagtgaacttcccggcagaggggtgcagctctatgacaccccttatgaggaacaggacccagagacagcagatggacccccttctgggcggaagcctcggcagagccggatgccccaggaagatgaacggccagcagatgagtatgatcagccctgggagtggaagaaagaccacatctccagggcgtttgcagtgcagtttgacagtccagagtgggagaggactccaggctcagccaaggagctccgga

SEQ ID NO: 2060 - protein, 85 aa, Homo sapiens
  VARIANT (1): Wherein Xaa may be any one of Ile or Leu of Phe or Val
XMSELPGRGVQLYDTPYEEQDPETADGPPSGRKPRQSRMPQEDERPADEYDQPWEWKKDHISRAFAVQFDSPEWERTPGSAKELR

SEQ ID NO: 2061 - DNA, 408 bp, Homo sapiens
  misc_feature (1)..(394): Wherein any n is one of a or t or c or g
nntggccagggcgaggtcactgagcagctggcgcacctggtgcgggccctctggaccctggagtacaccccgcagcacagccgcgacttcaagactattgtgttcaagaatgcactgcagtaccggggaaattcccaacatgatgcccaggagtttctgctgcggcttttggaccgagttcatgaagacctcaaccattcagtgaagcagagtggccagcctcctctgaaggtccttttgtgcctgaacactctattctgtcatatgactatatgcgtgtggctgactctcnccaccaattgagacatcctcaagccaccatcagagactgatatgatgcctgagggaccatctnntcctgtctgtagcacttttgtacaagaactctttcanngcgcatacagatct

SEQ ID NO: 2062 - protein, 100 aa, Homo sapiens
  VARIANT (1): Wherein Xaa may be any one of Ala or Arg or Asn or Asp or Cys or Gly or His or Ile or Leu or Phe or Pro or Ser or Thr or Tyr or Val
  VARIANT (98): Wherein Xaa may be any one of Ala or Pro or Ser or Thr
XGQGEVTEQLAHLVRALWTLEYTPQHSRDFKTIVFKNALQYRGNSQHDAQEFLLRLLDRVHEDLNHSVKQSGQPPLKVLLCLNTLFCHMTICVWLTLXTN

SEQ ID NO: 2063 - DNA, 411 bp, Homo sapiens
  misc_feature (1)..(382): Wherein any n is one of a or t or c or g
nncggccggcctgcctcaggcgtcgcgtcagctcccgtgtccgtgcccttaacccacaccgatggcgggatccggctgcgcctggggcgcggagccgccgcgttttctggaggccttcgggcggctgtggcagtgactttgtatggagtgtttacaatccacttttctccaaatgtgccatcacgctgtctgttgcttgaactcctggatgtcagtgtttcggaattgctcttatattccagtcaccagggttgttccatgtggatgatacagcattgtgcccgagatgttttggaggcccttgcttttcttcatcatgagggctatgtccatgcggacctcanaccacgtaacatattgtggagtgcagagaatgagtgtnttacactcattgactttggacttagcttc

SEQ ID NO: 2064 - protein, 137 aa, Homo sapiens
  VARIANT (1): Wherein Xaa may be any one of Ala or Arg or Asn or Asp or Cys or Gly or His or Ile or Leu or Phe or Pro or Ser or Thr or Tyr or Val
  VARIANT (115): Wherein Xaa may be any one of Arg or Ile or Lys or Thr
  VARIANT (128): Wherein Xaa may be any one of Ile or Leu or Phe or Val
XGRPASGVASAPVSVPLTHTDGGIRLRLGRGAAAFSGGLRAAVAVTLYGVFTIHFSPNVPSRCLLLELLDVSVSELLLYSSHQGCSMWMIQHCARDVLEALAFLHHEGYVHADLXPRNILWSAENECXTLIDFGLSF

SEQ ID NO: 2065 - DNA, 351 bp, Homo sapiens
ttgttagagccaccgtgttgtgttgggggtgctggcttagtttagggtggggatgagaagctttgagggaccagggtggaggcctccccagggctcctccttctccagcaagcagtactaacctccacagccagggtggaagccacagaacactcagagacagcagtcaaagaggccacttctgcactgcctggaccagagactgcaaactgcccttcaagctgcatttcaagtgccttctgtgtgtgtgtccacgtgttcccctaagcgactgggctacaccagtccaccacaaaggggagaaaccaagacaccgagaacacagcttaatagatctgtgatttggaattc

SEQ ID NO: 2066 - protein, 61 aa, Homo sapiens [sequence omitted]

SEQ ID NO: 2067 - DNA, 1206 bp, Homo sapiens
aagcttaacacctctttctgggaaactaaacaacgaaacttgaatttgaaaattgaccttcatcggatgttaattagccttcttaaaacattgatggttgagaatgataagaaccaaatgatgtttgtggagtgcgcagggtgtgcaaggccctgtgcaggtgtctggggggtgggctttggagaactgccaaggtatgaatgctggttctgccacttactagttgtttgttcctggaggagctattaccattagttactttcctaatttataaaatgaaaccaataaggcctgccctacagatcttttctgtgggtaggtacaatgcacaatacagtctccgcttgccagttaaaaaaaaatgtcaagagaggtctctgctctcaaagaatttgccatctagttagggagacgaggcgggagcatgcaaaaagtcaattagtaacaaaggattgaaataacaattccagacaataacagaaaagatgtcacaaggctgtatatgattaattgccaaatgaatttttcacacagtaagaattcaaagagagaacatttaggattgggacatctaccaagttcatcatcccgtcattccgcaaccttccgtgcagcgaatccttcctgtcctcgcgctcacagcccatgtgggatcctgggctggtctggagggcatctggcattccacatgggcctcccgttattggagatgtggtctctccccagtggcgaggccgtgttccaaaggaatatcctgcagaatactccaaacccaagataactgttccagtatgaatggagtgccaggtctctttccattgcaagtggcgaacatgcaactgaatccagctttgagatgtggatttatccactcaatggctggaacaatccaggtgcaattcctgggagcaggcacgctggatgcatgggccgagccttccggggccctgcctggcccctctctggcccttcccaggctggggtggggtggggttggctccctcaggccagccctctccgcagccagcgacccgagacaggggcaccagtatccgggactcaggctggggcagtgggggcacacacgaatgcggtcgcggggcctcggagaggggcagattagaggggtcgggtctgggagtgagaccacagcgcgcgcccggctcaggcaaagcccgcggctcccgctcccgccgctcagtgcac

SEQ ID NO: 2068 - protein, 138 aa, Homo sapiens
MNGVPGLFPLQVANMQLNPALRCGFIHSMAGTIQVQFLGAGTLDAWAEPSGALPGPSLALPRLGWGGVGSLRPALSAASDPRQGHQYPGLRLGQWGHTRMRSRGLGEGQIRGVGSGSETTARARLRQSPRLPLPPLSA

SEQ ID NO: 2069 - DNA, 381 bp, Homo sapiens
aagcttatgaggaatgagggggcaggtgtctggaccagtgtctggtcttcaaacggagcttacgagtctcaggaggccacaactgtcccattagttgactttctgaggagaaatgatgtgcccaactgtctcctgaagcctccaaacactgaggggggcactcaacccctgagctgcccccaagatgctaaacaacagtgagaatgtacaggagttcaaacctgggcagaaataaaatatgggtttcactttcccgaattgaacatgggatggagtactgaaggaaagtgcccctgcctcctgagtagtgaccacccaggacctgaggcactttatcccaggggtcagagcaactgaggagtgcagttgccagaaaattag

SEQ ID NO: 2070 - protein, 64 aa, Homo sapiens [sequence omitted]

SEQ ID NO: 2071 - DNA, 409 bp, Homo sapiens
  misc_feature (1)..(407): Wherein any n is one of a or t or c or g
nngtgcacaccactgggcccatctaatttttgtattttttgtggaggcggggtttcaccatgttgcccgggctgttctcgggcccctgggcttgagcgacccacccacctcagcctcccaaagtgctgggattatatgcatgagcggacatgcccagcctgcgcccctctttttagaggggctgcggtcctattggattagggcccacttatattacctcatttaatcttgattacctccataaagaccctgtctccaaataccatcacatcagaggtgctggggttaggacttcagcatgtggatttgtggggggcataatttgccttgtaccgggaggatattaagtgttcatgttactctccctgtagccctgagagcatctcccttagagtatcctataaaanga

SEQ ID NO: 2072 - protein, 66 aa, Homo sapiens
  VARIANT (1): Wherein Xaa may be any one of Ala or Arg or Gln or Glu or Gly or Leu or Lys or Met or Pro or Ser or Thr or Trp or Val
XCTPLGPSNFCIFCGGGVSPCCPGCSRAPGLERPTHLSLPKCWDYMHERTCPACAPLFRGAAVLLD

SEQ ID NO: 2073 - DNA, 485 bp, Homo sapiens
cctaggggccaagggtgccggctccaccggggtcacgatctgaacagtggtctgggctctgaggggtcccacagagaggtaaaggaggtaattgcccacataagagcgctttaggtaggaaaggggcagggaagaacaagggaaagggagagagggaagagggtgacacttggagacactgacatgcagtagttgatggataaccgcaacgacattcatagctacctctcagatcttaccttcgccagccgctgctctaagcgttgtgtctgtattagctcatttaatattaacaacaatcttaggaggtagtccattctgcaggcgagaaactgaggcattgtgaggttaatgtgatgtgaggggcagagctaagatacatagagtaatgacaaagttgtgctggctcccaggcaagttctaaaggcttatttcgtctttacaacagccctttgagataagtcctattataaccccattgtaca

SEQ ID NO: 2074 - protein, 73 aa, Homo sapiens
MNVVAVIHQLLHVSVSKCHPLPSLPFPCSSLPLSYLKRSYVGNYLLYLSVGPLRAQTTVQIVTPVEPAPLAPR

SEQ ID NO: 2075 - DNA, 638 bp, Homo sapiens
tctagataagtagccagaaggaacttagtaaaagtctacttaatggtgtaaataaggaaagtggttctgacgaaaagaatgaagatgtccttgaggaagcgctgccaggaataaactcagcattaaaagaattctcagagacattttacagcattgaaagtgcaaagggtaaaataatgtaaacggatccaaacttaagaaggaatatgacaagttgccaagatatagaagtgaagcttgcttcctatcataagatataccatgagaagaagagccagaccttgatttcatgcgagaaggtggagtaggaggaagagaaggaggagagttagaaggagtaggaggaggaggaaaacctcctgcaggctcgtctgagtatattcctaggtgatggcagaggggcaagaaagcaagcaaaaagaagcacagaagccctctcatggccaaaactggcttggtgtcacttttacctcattctattggtcaaaaaaagtcaacaggctgagcccagagtcagagtgggagagtactgcatggttacatgacagaggatgtggatatgaggaatcgtgaagaactgcatccattagagccatctgtcacagaagggactattgtcattttactaattttgtaca

SEQ ID NO: 2076 - protein, 133 aa, Homo sapiens [sequence omitted]

SEQ ID NO: 2077 - DNA, 311 bp, Homo sapiens
ggatccctcaggctcactcctcaggtgccaggggccaatctgcctcaggattccttcgtggttttaattttggcctgttttatagtcatgcagaatcaactgcaaggacatccttgctcatctggtcccacctcaaatcatcttttgcttagacaaaacgaattatcccaggagctagaaactcatcctacactaggagaaacatcccaacccagggtgacagggttcttaaagtggaaatcagcttctccaacttccgtcttttgatcctagatctgcttatcccattatacacagataaggctcctctt

SEQ ID NO: 2078 - protein, 59 aa, Homo sapiens
MQNQLQGHPCSSGPTSNHLLLRQNELSQELETHPTLGETSQPRVTGFLKWKSASPTSVF

SEQ ID NO: 2079 - DNA, 324 bp, Homo sapiens
ctcgagcctccacacccgactaactttaaaactttttgtagagatgaggcctcgctgtgtttcccagcctgatctcgaaatcctggcctcaatcgatcctccaaccatggcctcccaaagcgctgggattacaggcgcgagccatggtgcccggccgcttttacacaattgaataacattaaaataggtggcagaagacagacagaaagtcgattcgtggttgccaggcgtcgtgaataccggggaacgcggagtgcctattaatgggtaagggtttcgttttggaatcagacagcggcgatggctgcacaactttgtgaattc

SEQ ID NO: 2080 - protein, 63 aa, Homo sapiens
SRNPGLNRSSNHGLPKRWDYRREPWCPAAFTQLNNIKIGGRRQTESRFVVARRREYRGTRSAY

SEQ ID NO: 2081 - DNA, 347 bp, Homo sapiens
gtgcacaacttaaacattaaacagggaggacagaaggaaaaccacttaggaggaggaagcagatggcagagagccgtttaagatggcgggagggtatcactcagggagtgccccagagtgcttgctctggagtttcagaacccaaggatgcagactctaccccagggaccacatggggacagagaggcattatggtaaagggtgcctgccaggatgcccaggtcccagtctgctacttccttgactggtggccttgggctggttatgtatcctctttgtggcttagtttcgccatctctggaatggggatactcactggacctactgcagcgtggttgtgagaattc

SEQ ID NO: 2082 - protein, 92 aa, Homo sapiens
MAESRLRWREGITQGVPQSACSGVSEPKDADSTPGTTWGQRGIMVKGACQDAQVPVCYFLDWWPWAGYVSSLWLSFAISGMGILTGPTAAWL

SEQ ID NO: 2083 - DNA, 411 bp, Homo sapiens
  misc_feature (1)..(2): Wherein any n is one of a or t or c or g
nnggccgtgaccatggaccctctggagacccctatcaaggatggcatcctctaccagcagcatgtcaagtttggcaagaagtgctggcggaaggtgtgggctctgctgtatgcaggaggcccatcaggcgtggcacggctggagagctgggaggtccgggatggtggcctgggagcagcgggtgacaggtcggcagggcctggccggcgaggggagcgacgggtcatccgcctggctgactgtgtgtccgtgctgccggctgacggcgagagctgcccccgggacaccggtgccttcctgctcaccaccaccgagcgaagccatctactggctgctcagcaccgccaggcctggatgggccccatctgccagctggccttcccggggacaggggaggcctcctcaggatcc

SEQ ID NO: 2084 - protein, 130 aa, Homo sapiens
LETPIKDGILYQQHVKFGKKCWRKVWALLYAGGPSGVARLESWEVRDGGLGAAGDRSAGPGRRGERRVIRLADCVSVLPADGESCPRDTGAFLLTTTERSHLLAAQHRQAWMGPICQLAFPGTGEASSGS

SEQ ID NO: 2085 - DNA, 501 bp, Homo sapiens
aaatttccatcacctgccagcaagatttattatatcaatgtagcagaccagcctgaagtgctatggactgataggggtacagtctttatgggcttgactataataaagagacagagggtctagtcaggtaaacaaaaacagtttctgggctttttgcttaggggaagtaatgagacaaagacatatttcagattgataggtaaatacaagaggccaaaggttttactccagtgaagaaactacatgtgggacagtagctgcagttggagtcatcatctgattaagtttatgatgatacactgttaccctctaagactgtcagtctttgaagcatatactaaacaggtgagtcaaatgcagattgataggaataattaccctgcatttttagtcttgcttggttacattcatctttgaggttccacacagggatttagtattgccttctattttttgtaaggtaatcccaggtccttccacttggttatttccaccataata

SEQ ID NO: 2086 - protein, 57 aa, Homo sapiens
MWDSSCSWSHHLIKFMMIHCYPLRLSVFEAYTKQVSQMQIDRNNYPAFLVLLGYIHL

SEQ ID NO: 2087 - DNA, 417 bp, Homo sapiens
ggtggctgagccaggtgaaaaataagtctcttgtctccggcctcaactctgtgcagcctctcaatctgcagggccagggccaactgaggaaagcaaaattcaagccaggtggtgtctgggacagtgcctggtgctgtcagctggagctggcaggcccacattggaagcatcttctaagtaggaaggggagacaagggcttgaagctgggggagatggggaaagcctcccgccccatccacgccatccctgccttcccctcgtcctgggtattttggagcctgccagctgaggagtgctctcccagggttgggactgcaggcgcctgacaaactgaagagcactgaagctggagatgcaaagaagagggagcattgactatgttcttggagcaaccagcaagtcagtgaggcacgcgt

SEQ ID NO: 2088 - protein, 78 aa, Homo sapiens
MLPLLCISSFSALQFVRRLQSQPWESTPQLAGSKIPRTRGRQGWRGWGGRLSPSPPASSPCLPFLLRRCFQCGPASSS

SEQ ID NO: 2089 - DNA, 410 bp, Homo sapiens
ggatcctgctcataattaattcagcttatgaactcctgttttttttctgattcagcacattgatatatttttaaaatataaaagtcataaagtaggaaaaacgtagatatcatcattatttctatctgccattctaaacaaaatataagcaagtgtgtcttataagattccattagatatggcagcggggggattaagttattaccactcgtctttaaaattttttattttgaaataattttagatgtttagatttgcaaggatagtatagggagtttttctacatttttactgatgtttaccctaaagttaacctcttacatagccatgatgtgtttatcaaaattaagaaactaacattgctacaatactgtgaactaaactacaaacattattgagtattcactagt

SEQ ID NO: 2090 - protein, 50 aa, Homo sapiens
MESYKTHLLIFCLEWQIEIMMISTFFLLYDFYILKIYQCAESEKKQEFIS

SEQ ID NO: 2091 - DNA, 306 bp, Homo sapiens
gctagcagtatcctcacatatcaggttcaaactggtggaatcatccagtcaaaccctgccaagcgtttaactgtagacgaagcagtacagtgtgatttaataacttccagcagtgctcttctggtcctggaagctcagcgaggctatgttggactcatttggccccattctggtgaaatatttcccacatcatcttccttgcagcaagaattgattacaaatgaattggcctacaaaatcctgaatggcagacaaaaaatagctgctctttatattccagaaagttctcaagtcattggcttggat

SEQ ID NO: 2092 - protein, 102 aa, Homo sapiens
ASSILTYQVQTGGIIQSNPAKRLTVDEAVQCDLITSSSALLVLEAQRGYVGLIWPHSGEIFPTSSSLQQELITNELAYKILNGRQKIAALYIPESSQVIGLD

SEQ ID NO: 2093 - DNA, 349 bp, Homo sapiens
gctagcttttgaatagtaagtcaaggacaacgggaatgatggagagaggaggagatgactgtgcttcagcagaagggcaagaacagcaaggaccaaagtggagtctctgaggggtctccagatagagaaagatgggcgctggaagcagcacggtggcaggcggagaagtgctcgtgagcgggcagaggatggctaccccgcatccctttcctcttctctccatcacctcgcaacgtctctggaacataaaacttccctgtctcccttggctctctcgcttccgggccctgcctcctaatgtgagcctccggccattaacagcctttactagaagccgctagaacagaac

SEQ ID NO: 2094 - protein, 81 aa, Homo sapiens
MFQRRCEVMERRGKGCGVAILCPLTSTSPPATVLLPAPIFLYLETPQRLHFGPCCSCPSAEAQSSPPLSIIPVVLDLLFKS

SEQ ID NO: 2095 - DNA, 356 bp, Homo sapiens
  misc_feature (1): Wherein n is one of a or t or c or g
ntgccagtcctgcttgctctcagcacctgcagccgtcctctgcccagcagcctgctgggctccattctggagacaccccaacccccaccttatcccaagggccttgcaatgctgagttaacttggataacagcaattccaatgctggccaccaaaaaacttgacattcagggtcagacatgatgcttcttaggaatttgtcaaccatctttcctcacagagaatctctcacaagctgggagtcgggaaacctaacctctcagagtgttctggaaactccttctcccttctcaggtcccctcacccttctcatttctaatgccaaagctattcagaacttccgctccttggggatcc

SEQ ID NO: 2096 - protein, 69 aa, Homo sapiens
  VARIANT (69): Wherein Xaa may be any one of His or Gln
MVDKFLRSIMSDPECQVFWWPALELLLSKLTQHCKALGIRWGLGCLQNGAQQAAGQRTAAGAESKQDWX

SEQ ID NO: 2097 - DNA, 291 bp, Homo sapiens
  misc_feature (12)..(76): Wherein any n is one of a or t or c or g
acgcgtgtattncctgcgcgcttgcggggacgtgcttgtggagggcggagagagggatgggcngtgctaatatganagctgcatctttactagttagctaccatgcgtcattatttatcaaaagatatatgctgcttaaacacaaatacgttttaaaatatattttaggcagtatggttttgggtttttttttttgcaagttcttttggtgagtaaatttagtgataaatgatttttttttcttttgagacagtttgctctgtcgcccaggatggattgcagtgcagtggg

SEQ ID NO: 2098 - protein, 51 aa, Homo sapiens
  VARIANT (3): Wherein Xaa may be any one of Arg or Cys or Gly or Ser
  VARIANT (7): Wherein Xaa may be any one of Arg or Ile or Lys or Thr
MGXANMXAASLLVSYHASLFIKRYMLLKHKYVLKYILGSMVLGFFFCKFFW

SEQ ID NO: 2099 - DNA, 331 bp, Homo sapiens
  misc_feature (1): Wherein n is one of a or t or c or g
ntcgcgctaccacacgtcacaggaatcccatggatatcatgtccgcatgaagaaaaacatagtcatgctgccagggtgattgtcgcagctctgcctccctagggctatggcccgtggtctcggctcctcaagttccgctgccattactaccaaagccgctgacacccgtggagcccaatcacggatcccacgccttgggaaagccagtgcgcttgctgacatgagtggctctggcgggtggcccaaccattaggcgcagatcccccgcagccgagagagaagtggcccgtcagccactcggcttggcttggcaaaagccgctccgctcgag

SEQ ID NO: 2100 - protein, 61 aa, Homo sapiens
MSASALAFPRRGIRDWAPRVSAALVVMAAELEEPRPRAIALGRQSCDNHPGSMTMFFFMRT

SEQ ID NO: 2101 - DNA, 370 bp, Homo sapiens
  misc_feature (1)..(370): Wherein any n is one of a or t or c or g
ngaaatactggctgagggtggaggggaatctagattgtactgttagagggagatgaatatccattagtcacagaactagttgcagctgttgggggagtagcttctcatgctcatgttattgtagtatttgtaaaggttggttcttcagatgttgacctgtcaaggcaagacggtgaactcaacactggatctgagtgggtccagccatgtacaaggtaggttgagcagacactcagtttctcttgcatgtttgctaagggcatccagagctcaccggcagacacttccacatgctgatagatcatgagcaggctggaactcatcaactcagaaaagctattgttcctaagcagtcaggaaagattctacn

SEQ ID NO: 2102 - protein, 70 aa, Homo sapiens
MSSSLLMIYQHVEVSAGELWMPLANMQEKLSVCSTYLVHGWTHSDPVLSSPSCLDRSTSEEPTFTNTTIT

SEQ ID NO: 2103 - DNA, 395 bp, Homo sapiens
  reverse complement of SEQ ID NO:89
  misc_feature (22)..(347): Wherein any n may be a or t or g or c
caccgcagatgacccccgtgcnacgtcccgatcgctcacggcacgcaacgacgaagcagggatcgctcagacaagggcacgtcatcgtcaagaagattacaancnacaatgttcttctcggcgtcaacggttcgggacccganatggtcgtcaatgctcgcggtatcgcctatggacgacaccgcggggagatcgtcgatgcctcatcggcccagcgatatgtcgcagagggtgcctatcgcacgaccgccatcgcatcactgctaacgnacgccactcacaccgaggtgcgagtggcacaggcaatcgtcgaattggcgcgcgaagagctgggcactccccatgcncgacggatgatgctgcccatcctcgatcacctcgtcgcagctgtgcac

SEQ ID NO: 2104 - DNA, 360 bp, Homo sapiens
  reverse complement of SEQ ID NO:173
  misc_feature (21)..(350): Wherein any n may be a or t or g or c
agcggaatcagagacttttcnttttcactgtcccanacaggagagtgatgtgggctactcatatccgacagagccataaagttgagttctttcttctcctccaagttctccagcacactnggatggtgcncacggcctgggaacctctaatcatctttcttcctaacgtaagtggaggggggtgagaggtggaaggaggaagtccatgaacaagtttctgcgtttattttcaggcagcgtggcaacggctcatgactcagccagggactgttccatgattttcaatccatccaatgctccgtaccaggcagtgagcttctcacagctgacccatctacttcagttntgggagccccatgg

SEQ ID NO: 2105 - DNA, 325 bp, Homo sapiens
  reverse complement of SEQ ID NO:251
  misc_feature (23)..(325): Wherein any n may be a or t or g or c
gtgcagtggctacttgctcagcntctgctatcctacaatcaatgagaccccaagtgagtgggcaactagaagcaaatgaagggcagttggctgtagtgacctgtgaagcttctaagtcttaagagacctcgacatttagagagtttgcatctcagatgtgtggtggcatgtgtgtgtgtctattactagcaatctatcgtaatattatgttgcagaatgtgggcaaggagcagagcaaggggtggggaatttttagcccccgtttctgccntgatgggctcttagcacgcgtgggcagacacccgtggttcacatagcagcggcn

SEQ ID NO: 2106 - DNA, 325 bp, Homo sapiens
  reverse complement of SEQ ID NO:333
  misc_feature (11)..(230): Wherein any n may be a or t or g or c
ctcgagaatgncctcgtcctggatgacgaaggaggagtganatgcaccatcagcctcaatgattgccaagtcgcgatccggatggatggtgccccaaaaacggaattgagaatgtaccagtggtgcagcctgcgccagggctatctgacggctgacaccggcatcacgagcttcaaccgggcatccagtgggctcggagtcgccgtccgggactcgtccgagatngtcgccgcgggccttcccgtcatccctgacacaccgatcacatggagtgagggtgacatcacggttcagctcgatccctgcggccgcgcctccctgatca

SEQ ID NO: 2107 - DNA, 360 bp, Homo sapiens
  reverse complement of SEQ ID NO:349
  misc_feature (360): Wherein any n may be a or t or g or c
tctacacactaaaagctgaattatactatatgtaaattataccttaattttaaaacggaaaaaaagaagacaaaagaaaaaggagggcccttaagaaaaccatatagccctcaaattcgacctttctgatccaactctgcaaagtcaaatgtgaaataaatgatgttgtattatgctatcatgtcattttgtaggaaaaatatgtctaaaatatatacacacttgactgagaattacctcaaagtagcaaaaatacattttgttcgcataaaaataacttatttttatacttttaactttatttatcaagataaattgattcctccactattttatacaaaatgttggaacctgtttcan

SEQ ID NO: 2108 - DNA, 443 bp, Homo sapiens
  reverse complement of SEQ ID NO:371
  misc_feature (397)..(443): Wherein any n may be a or t or g or c
cccggctcgaccgctcgccgcgcctcatcgtcatagccgtgctatgtgcatgcgtaggcgccctgggggagctgtgccctggcaccgcgcctctcatgccgaccaagttcttgtcatgacgcgagctgtagggcagggagatatcgtccgcaatgccgatagtgggctgacttcagtggccgtcgatcgggccgtcgcaacgatcccagcttcccaactcgacgaaatcgttggtcgtcatgctctggtcgacctatcaccaggacaacttctcggccctcactcggtgggagaactacgggtggcaccagggcgcgcacggataggtctcaaacttgctgctggacgcctacccactgtctccctacccgctggcgcccgcgtcaccgtgataganaccagccccgacaaggacacgggactgtttctaatctgtcacgccn

SEQ ID NO: 2109 - DNA, 396 bp, Homo sapiens
  reverse complement of SEQ ID NO:485
  misc_feature (1)..(170): Wherein any n may be a or t or g or c
natcggctactgaggtgtgttggaagtnatagccacaatattctgcagctcctcccatcaaggtagtgttgtttttccagccatnagtatntgagctggccttgtgccctgcttaaccaatnnanatgagcagatgtgtttatgggctggttatgagacctanagagaccttctgcttcagtctcttggggtcctgctggcatgtaaagaagctcaggctaagccatggacggatgagagaccacgtggggagattcccaacaagtcccaacccacatcacatggaagaaagtcatacagcagcgccctcatgcagaatggtggacccagatgcacataacttgcaaagaaattgtctgaaaggaggtggccgtcagtcagagtgaagaaggtacc

SEQ ID NO: 2110 - DNA, 299 bp, Homo sapiens
  reverse complement of SEQ ID NO:495
  misc_feature (1)..(290): Wherein any n may be a or t or g or c
ngcaccagccgctcaaatccaatgcgcagcgcgaaacgttgagacagcgtgacgcagcacggatgtntgctccgcgttaaatcgaccgggatattcgttgaggtcatgattcgcaatcagaaccagtccgcccgccgatgctgacccaagcgcttctgcttgatgacagccgctctgttctcaactacctgaaacgtcacattgaagcggagggcttcgtagaggccacgaccttcctcgatccagtcgaggcgctggcctgcgcgcgcgagagagtgatcgatntggtgctggtcgac

SEQ ID NO: 2111 - DNA, 390 bp, Homo sapiens
  reverse complement of SEQ ID NO:497
  misc_feature (21)..(390): Wherein any n may be a or t or g or c
tgtacaagtgagctaccaaanacccctttcagtctatcatgtccanatctagtataccaaaatgcccccacgaactaccaagctcgatcaccaaatttccaaaccaatccataacttagaagacaagctccccatccaaatacctgaagttatcaacaggtaccgccttcccaaaaaggcagttatgatccacctcaacccagattcgagaagaagactcccaagagctntactgcacttgctgaaagatgaacaaagttgtacgagctactggatacatccacctggtggggcccacgccggtggatactagttcaaaattctataggactgatcaaaggtgaagactgtataaacctcaagcataagattaaagatctgatcaacccn

SEQ ID NO: 2112 - DNA, 478 bp, Homo sapiens
  reverse complement of SEQ ID NO:701
  misc_feature (29): Wherein any n may be a or t or g or c
tggccagaggggcgaccccgcccgatgtnacgcgccccgcccgagccccggcccctgcacgggggggcagcgaaacttctctgcgggttctggcgctggggcaccgaccccgcaacgactgcccgggctgcgggaggggaggagagcagagaacgtccccagggtgatgtgagcagagcccaggaatgccttatgtggatcggcagaaccgaatctgtgggtttctggacatcgaggagcatgagaacagcggcaagtttctgcggaggtacttcattctggacacccaggctaactgcctcctctggtatatggacaacccccagaatctggcaatgggggcaggagctgttggagctttgcagctgacctacatctcgaaggtgagcatagctgccccaaaacagaaaccaaaaactccattttgctttgttatcaatgccctgtctcagagatatttccttcaagccaatgatca

SEQ ID NO: 2113 - DNA, 433 bp, Homo sapiens
  reverse complement of SEQ ID NO:719
  misc_feature (2)..(433): Wherein any n may be a or t or g or c
anatcccagggagctcctaagccctgctttgcccacatcactgccacagagaagtcagagtaagggacttgttgctanannatccttanaaaggttaaatacttaaaaagattaaagcaacataactgtanacatatcgtataaaaatgaaanacacaggaaccctcttcccttccgcctggtgtgggcttgggaaatgggcaagcggccccagcaatcatgggaggaactcttgcgggggagcggtctgggattccaaatgggcaggtcacacgaaggtcacgatgcttctctgcatcctgaaaagggctggggacagggccagtgggggtggtaagggtatttatagcacagtgcttgaaaagggaagattaatgtgtaaatataaaggacacacaggatggagatcgctcagaggcaagaggagggtgcn

SEQ ID NO: 2114 - DNA, 349 bp, Homo sapiens
  reverse complement of SEQ ID NO:859
  misc_feature (136): Wherein any n may be a or t or g or c
aatggggcggcccttttgagaaccagtgctgacccctgtaacagtcggtcagtcgaaacctgccctagaggctccatgaggaggccatgggtcctgtccttcctcgcgtctgtggggatcctggttcagggctctntatgtccccctggcacgtgcctgagctgttgctggcactggagatacagctgcaaacatccatcaagggcctgcagtcaggagcttcagctcggggcatgggcaggaggagtggagacaactacaaacaggaggcatctggggcaatgtgctcatctattctcagtcctgcctgggtgacggcctgaactctgctatacactgtgaccctagg

SEQ ID NO: 2115 - DNA, 532 bp, Homo sapiens
  reverse complement of SEQ ID NO:919
  misc_feature (6)..(240): Wherein any n may be a or t or g or c
ggctgngcctctcccacccgtcctctttgctcggaagggagaccggtttgctctcctccatgacagcccagcccctgctgtgcacaggggtggggctcggnatccctccctngaccctgatgtntattanctgnagatagngaatttcaagttgacaggtaccttctcagngatntatatataaatatagtnagaggaaaagttgnagtctnttttactactnnntagtgtttgantaaattatgctttaactggacagaagaaatatttctcagacaatgtcgatgctgctgatgacaactgagatgcctggagctcacccttgatggagacttccttggtgattggagatgggggactctggtggcagaaatggctttggggtaggtgtgaagttgcttcagtccctctgagttgcctcttgtggatggaacgtgtgtatcaacaacaatgaaatgcacctccgtgtgcatggaggcggctgatgagaatacagataggccagtcctcgctcttccctccagaacccgcc

SEQ ID NO: 2116 - DNA, 365 bp, Homo sapiens
  reverse complement of SEQ ID NO:961
  misc_feature (332): Wherein any n may be a or t or g or c
tctagaaaagattcattatgaaggctgtatttaaatatcaaagttgtggacttcatgataatcttaaataaagcaaatccaaattctcctgttgcctagacagattctaagatgtaatttacacttttaagctaattagtgagtattttatgattttagccttaaacaccatgtatgccaaataatgcacttgttttgtgaattacagaaatggtaagtgcccacatttctgtgaattataaaatttgtgagtttcttttaacccttttcaggagtgaaaaaattaaaacgaccatttcctggttgtgcttaagtatatgcaagaagggtanactctcatttttattatgtttgcttaaagatct

SEQ ID NO: 2117 - DNA, 414 bp, Homo sapiens
  reverse complement of SEQ ID NO:991
  misc_feature (28)..(160): Wherein any n may be a or t or g or c
gcctctctcgaaatcgagagcacattttnnagggacgaagataagctgtttatntggggcaggctgtggggagagctgtgcagcanacagccacccggggcccagggcagaggccttccaggctggctcgggcacttctgggtcccatgtccctggtttngcatcatccataccaatcactccatgttgctatgttccttcaccagaagactgggggctcaaaaagggcagggcagccctcactcaccagtctccccagcctcacccagctcagcacagggcaccaggcaggggctgagagtgctggggtaggtgggtgtggtcaaacagcttggaaagagtttggcctgctcattgcattcccctcagctcatcctggggatgtctgctcatgggagaatggcagagggatcc

SEQ ID NO: 2118 - DNA, 527 bp, Homo sapiens
  reverse complement of SEQ ID NO:1063
  misc_feature (484)..(491): Wherein any n may be a or t or g or c
gcgcaggtcagtggtccgggaatcggggcggaatgggagagatcttgagggcaagagcctcagagaccttcaggcaccgagctcgtgaaggtttccaagtgcccctctctagctgctcccagggggaattagtggttgctacagtagtttaagagggtcgtggtttttcgcaacccgggcggcgagatggcgctttggtgtaagcgaggtaaggtgggtgcactgggatctccgctctcggagcctccagctgactgccacgccgacttgtggccagacctgcgacctccgccctcccccgcggcgccagcctctggaatctggcgtcgcccccacctctccagtcgaagtgggagtccctctgtgcggggcctcgccgccatacccaggccgaatgggggtggggagggaagctggcagagctcggcctcaggatccgcgcccctgtggaaagaccgcagagggaagccgtttcaccagccntcntcccntctggggtctcgggaaacacgcggtaattaccgaac

SEQ ID NO: 2119 - DNA, 349 bp, Homo sapiens
  reverse complement of SEQ ID NO:1353
  misc_feature (128)..(280): Wherein any n may be a or t or g or c
gtgcactacagcctccagctcaagtgatcctcccgcctcagcctcccaagtagctaggattacaagagtgaccactatgcccagcttccctatacatagtgatagatatatgccaacaggtacccttnaattatgtgatgagaatggcactttacctctatggtcttcctctcaagaatatattaccccattctaatatcatgagggatcatctacaaaataccggaccagtcattctcaaaactatgaaggccatcgaaactaaggaaattctgagaanctaccacagccaagaggaacctaaagacacatgactactaaatgtaatgcgatatgctgggtgggatcc

SEQ ID NO: 2120 - DNA, 429 bp, Homo sapiens
  reverse complement of SEQ ID NO:1423
  misc_feature (44): Wherein any n may be a or t or g or c
ctgtgggaaggtgactagaacttgtatggtaaataagggttgtntagtaaggtttgttatgaagagagtcatccttctcttcctaatacggggaacacctttacaaatagaaatttatgtcagttttacaaagggaaatataagtcctgcttttaagcaaaaaaggggagagcagagaattcttcctgtgcctgctatttctcagtttccttcagctcaaaataattcttatgccaaagtgacatattttggggtgacaattctggtaccctgcagtggccttcatggcattgtctaaattgcttgctattctcttaaccataccaggtaggattcccccaacttttcacacctcttataagcatgaataaagagacataaggcaagggaaaaaaatcaaaatccagaattcccttgaagtgaagatct

SEQ ID NO: 2121 - DNA, 418 bp, Homo sapiens
  reverse complement of SEQ ID NO:1831
  misc_feature (25)..(120): Wherein any n may be a or t or g or c
cagtgtgattgtacctgtggggagnggaaataagtagactntgggaggactgctgcacactagcactgttcntagaaacccaaaatgtcactgtggtgcaccagtcacagtagggcctanagaggtcaggaaataagtggaggttctggcctgagtgcaactcatagtgggtctggtggatacctgaaccctaggattattttcccaattctaaaatgcagaggtggaattcacatattcagcaaatggcagattcccaaattgattccccaaattatgggccgtattagtctattttcacactgctgataaagacatacctgagattcggtaatttataaagaaaaggagatttaatggactcacagttccgcagggtggctgggaagcctcacaatcatggagaaggtgaaagctt

SEQ ID NO: 2122 - DNA, 266 bp, Homo sapiens
  reverse complement of SEQ ID NO:1835
  misc_feature (10)..(196): Wherein any n may be a or t or g or c
ctcgagagcntgagagaagtcccgcttagaagctgggctgggcagaacccttaaccaacattaagaagtctagctacactcctggagtccagctaacatggagaaaccatacagagaggccacatggagcggtggggacatgagaatgtgcagggagngagaggagtccagctgcctcataatcctaccggagcncaggcatcagccatctctgccaacctgcagcacgagtgaggacgcgagtgtgccacctggcaagtggatcc

SEQ ID NO: 2123 - DNA, 623 bp, Homo sapiens
  reverse complement of SEQ ID NO:1887
  misc_feature (509): Wherein any n may be a or t or g or c
acgcgtcggcggaggtggcttcgtcccgcggagtccaggcttcaggctttcaccagttctcaggatgcccatagggatgggtgaagcctgcctggcctgtggtgcttcccagtggccgtcatctcattagggccccacagtggcattaggatgcacctctcggcggtgttcaacgccctcctggtgtcggtgctggcagcggtcctgtggaagcatgtgcggctgcgtgagcatgcagccacactggaggaggagctggccctcagccgacaggccacagagccagccccagcactgaggatcgactacccgaaggcactgcagatcctgatggagggcggcacacacatggtgtgcacgggccgcacgcacacagaccgcatctgccgcttcaagtggctctgctactccaacgaggctgaggagttcatcttcttccatggcaacacctctgtcatgctgcccaacctgggctcccggcgcttccagccagccctgctcgacctatncaccgtggaggaccacaacactcagtacttcaacttcgtggagctgcctgctgctgccctgcgcttcatgcccaagccggtgttcgtgccaaacgtggccctcatcgccaaccg

SEQ ID NO: 2124 - DNA, 499 bp, Homo sapiens
  reverse complement of SEQ ID NO:2011
  misc_feature (5)..(270): Wherein any n may be a or t or g or c
ctactnctattatttatcaatatggctgctggctgtaactgagcagcagtggccacaatgagacaccaaaaagcactaggacgggggatattgtcagtgtttagccagatgtnctaggaatttctcccctattttagaatctccatntggaacagttttcatgttaggtgagaatcgatactgtnctcccaaactgtggaaaccactaaaaggcatgtcatgcaaaaagacacgttccattgtgggttttcccacgnttaccaagtcgntcgcgactagtactcaaccctccctaactgccacaggatttgggctcgaattttcttaacaagttccaccatgctttttattattattttggaagggggagattctggacgtgacagagaacccaagagtggggtggttgtgtgaaaagccaacagacgtctcagaagagccaagcattacactccagactctaaccaggcagtgtgaggcctcggttcagcgaggatcc

SEQ ID NO: 2125 - DNA, 356 bp, Homo sapiens
  reverse complement of SEQ ID NO:2095
  misc_feature (356): Wherein any n may be a or t or g or c
ggatccccaaggagcggaagttctgaatagctttggcattagaaatgagaagggtgaggggacctgagaagggagaaggagtttccagaacactctgagaggttaggtttcccgactcccagcttgtgagagattctctgtgaggaaagatggttgacaaattcctaagaagcatcatgtctgaccctgaatgtcaagttttttggtggccagcattggaattgctgttatccaagttaactcagcattgcaaggcccttgggataaggtgggggttggggtgtctccagaatggagcccagcaggctgctgggcagaggacggctgcaggtgctgagagcaagcaggactggcan

What is claimed is:

1. An isolated nucleic acid molecule encoding a polypeptide comprising an amino acid sequence that is at least 85% identical to a polypeptide comprising an amino acid sequence selected from the group consisting of SEQ ID NO:2n, wherein n is any integer 1-1051, or the complement thereof.

2. The isolated nucleic acid molecule of claim 1, said molecule hybridizing under stringent conditions to a nucleic acid sequence complementary to a nucleic acid molecule comprising the sequence of nucleotides selected from the group consisting of SEQ ID NO:2n−1, wherein n is any integer 1-1051, or the complement thereof.

3. The isolated nucleic acid molecule of claim 1, said molecule encoding a polypeptide comprising the amino acid sequence selected from the group consisting of SEQ ID NO: 2n, wherein n is any integer 1-1051, or an amino acid sequence comprising one or more conservative substitutions in the amino acid sequence selected from the group consisting of SEQ ID NO: 2n.

4. The isolated nucleic acid molecule of claim 1, wherein said molecule encodes a polypeptide comprising the amino acid sequence selected from the group consisting of SEQ ID NO: 2n, wherein n is any integer 1-1051.

5. The isolated nucleic acid molecule of claim 1, wherein said molecule comprises the sequence of nucotides selected from the group consisting of SEQ ID NO:2n−1, wherein n is any integer 1-1051, or the complement thereof.

6. An oligonucleotide less than 100 nucleotides in length and comprising at least 6 contiguous nucleotides selected from the group consisting of SEQ ID NO:2n−1, wherein n is any integer 1-1051, or the complement thereof.

7. A vector comprising the nucleic acid molecule of claim 1.

8. The vector of claim 7, wherein said vector is an expression vector.

9 A host cell comprising the isolated nucleic acid molecule of claim 1.

10. A substantially purified polypeptide comprising an amino acid sequence at least 80% identical to a polypeptide comprising the amino acid sequence selected from the group consisting of SEQ ID NO: 2n, wherein n is any integer 1-1051.

11. The polypeptide of claim 10, wherein said polypeptide comprises the amino acid sequence selected from the group consisting of SEQ ID NO: 2n, wherein n is any integer 1-1051.

12. An antibody that selectively binds to the polypeptide of claim 10.

13. A pharmaceutical composition comprising a therapeutically or prophylactically effective amount of a therapeutic selected from the group consisting of:
a) an isolated nucleic acid molecule encoding a polypeptide comprising an amino acid sequence that is at least 85% identical to a polypeptide comprising an amino acid sequence selected from the group consisting of SEQ ID NO:2n. wherein n is any integer 1-1051, or the complement thereof;
b) a substantially purified polypeptide comprising an amino acid sequence at least 80% identical to a polypeptide comprising the amino acid sequence selected from the group consisting of SEQ ID NO: 2n, wherein n is any integer 1-1051; and
c) an antibody that selectively binds to the polypeptide of part (b); and a pharmaceutically acceptable carrier.

14. A kit comprising in one or more containers, a therapeutically or prophylactically effective amount of the pharmaceutical composition of claim 13.

15. A method of producing the polypeptide of claim 10, said method comprising culturing the host cell of claim 9 under conditions in which the nucleic acid molecule is expressed.

16. A method of detecting the presence of the polypeptide of claim 10 in a sample, comprising contacting the sample with a compound that selectively binds to said polypeptide under conditions allowing the formation of a complex between said polypeptide and said compound, and detecting said complex, if present, thereby identifying said polypeptide in said sample.

17. A method of detecting the presence of a nucleic acid molecule of claim 1 in a sample, the method comprising contacting the sample with a nucleic acid probe or primer that selectively binds to the nucleic acid molecule and determining whether the nucleic acid probe or primer bound to the nucleic acid molecule of claim 1 is present in the sample.

18. A method for modulating the activity of the polypeptide of claim 10, the method comprising contacting a cell sample comprising the polypeptide of claim 10 with a compound that binds to said polypeptide in an amount sufficient to modulate the activity of the polypeptide.

19. The use of a therapeutic in the manufacture of a medicament for treating a syndrome associated with an ORFX-associated disorder, wherein said therapeutic is selected from the group consisting of:
a) an isolated nucleic acid molecule encoding a polypeptide comprising an amino acid sequence that is at least 85% identical to a polypeptide comprising an amino acid sequence selected from the group consisting of SEQ ID NO:2n, wherein n is any integer 1-1051, or the complement thereof;
b) a substantially purified polypeptide comprising an amino acid sequence at least 80% identical to a polypeptide comprising the amino acid sequence selected from the group consisting of SEQ ID NO: 2n, wherein n is any integer 1-1051; and
c) an antibody that selectively binds to the polypeptide of part (b).

20. A method for screening for a modulator of activity or of latency or predisposition to an ORFX-associated disorder, said method comprising:
a) contacting a test compound with the polypeptide of claim 10; and
b) determining if said test compound binds to said polypeptide, wherein binding of said test compound to said polypeptide indicates the test compound is a modulator of activity or of latency or predisposition to an ORFX-associated disorder.

21. A method for screening for a modulator of activity or of latency or predisposition to an ORFX-associated disorder, said method comprising:
a) administering a test compound to a test subject at an increased risk ORFX-associated disorder, wherein said test subject recombinantly expresses a polypeptide encoded by the nucleotide of claim 1;
b) measuring expression the activity of said protein in said test subject;
c) measuring the activity of said protein in a control subject that recombinantly expresses said protein and is not at increased risk for an ORFX-associated disorder; and
d) comparing expression of said protein in said test subject and said control subject, wherein a change in the activity of said protein in said test subject relative to said control subject indicates the test compound is a modulator or of latency of predisposition to an ORFX-associated disorder.

22. The method of claim 20, wherein said test animal is a recombinant test animal that expresses a test protein transgene or expresses said transgene under the control of a promoter at an increased level relative to a wild-type test animal, and wherein said promoter is not the native gene promoter of said traisgene.

23. A method for determining the presence of or predisposition to a disease associated with altered levels of a polypeptide of claim 11 in a subject, the method comprising:
a) measuring the amount of the polypeptide in a sample from said subject; and
b) comparing the amount of said polypeptide in step (a) to the amount of the polypeptide present in a control sample, wherein an alteration in the level of the polypeptide in step (a) as compared to the control sample indicates the presence of or predisposition to a disease in said subject.

24. The method of claim 23, wherein said subject is a human.

25. A method for determining the presence of or predisposition to a disease associated with altered levels the nucleic acid molecule of claim 1 in a subject, the method comprising:
a) measuring the amount of the nucleic acid in a sample from the mammalian subject; and
b) comparing the amount of said nucleic acid in step (a) to the amount of the nucleic acid present in a control sample,
wherein an alteration in the level of the nucleic acid in step (a) as compared to the control sample indicates the presence of or predisposition to said disease in said subject.

26. The method of claim 25, wherein said subject is a human.

27. A method of treating or preventing a pathological condition associated with an ORFX-associated disorder in a subject, the method comprising administering to said subject the polypeptide of claim 10 in an amount sufficient to alleviate or prevent said pathological condition.

28. The method of claim 27, wherein said subject is a human.

29. A method of treating or preventing a pathological condition associated with an ORFX-associated disorder in a subject, the method comprising administering to said subject the nucleic acid molecule of claim 1 in an amount sufficient to alleviate or prevent said pathological condition.

30. The method of claim 29, wherein said subject is a human.

31. A method of treating or preventing a pathological condition associated with an ORFX-associated disorder in a subject, the method comprising administering to said subject the antibody of claim 12 in an amount sufficient to alleviate or prevent said pathological condition.

32. The method of claim 31, wherein said subject is a human.
